(19) United States
(12) Patent Application Publication
(10) Pub. No.: US 2024/0110201 A1
(43) Pub. Date: Apr. 4, 2024

(54) Compositions and Methods for Treating Hereditary Angioedema

(71) Applicant: Spark Therapeutics, Inc., Philadelphia, PA (US)

(72) Inventors: Christopher Riling, Exton, PA (US); Francis Pankowicz, Philadelphia, PA (US); Sean Armour, Holland, PA (US); William John Quinn, III, Philadelphia, PA (US); Michael Preston, Downingtown, PA (US); Stephen Ioele, Marlton, NJ (US); Daniel Cohen, Philadelphia, PA (US); Zhenwei Kelvin See, Wayne, PA (US)

(21) Appl. No.: 18/262,959

(22) PCT Filed: Jan. 27, 2022
(86) PCT No.: PCT/US2022/014091

§ 371 Date: Jul. 26, 2023

Related U.S. Application Data
(60) Provisional application No. 63/142,121, filed on Jan. 27, 2021.
(60) Provisional application No. 63/201,466, filed on Apr. 30, 2021.
(60) Provisional application No. 63/261,603, filed on Sep. 24, 2021.

(51) Int. Cl. C12N 15/864; C12N 15/62

(52) U.S. Cl. CPC C12N 15/8645; C12N 15/625; C12N 2830/001; C12N 2830/50

(57) ABSTRACT

Nucleic acids encoding C1 inhibitor are described. Also described are expression cassettes, vectors, cells, and cell lines containing the nucleic acids, as well as methods of using the nucleic acids to treat complement-mediated disorders, such as hereditary angioedema.

### CROSS REFERENCE TO RELATED APPLICATIONS

[0001] This application claims priority to U.S. Provisional Patent Application No. 63/142,121 filed Jan. 27, 2021, U.S. Provisional Patent Application No. 63/201,466 filed Apr. 30, 2021, and U.S. Provisional Patent Application No. 63/261,603 filed Sep. 24, 2021. The entire contents of the foregoing applications are incorporated herein by reference, including all text, tables, sequence listings, and drawings.

### FIELD OF THE INVENTION

[0002] The instant invention relates to the field of gene therapy. In particular, the instant invention relates to optimized cassettes for expression of human C1 inhibitor and methods of using the same for treating complement-mediated disorders, in particular hereditary angioedema.

### REFERENCE TO SEQUENCE LISTING SUBMITTED ELECTRONICALLY

[0003] This application contains a sequence listing that is submitted electronically via EFS-Web as an ASCII formatted sequence listing with a file name “SequenceListing5WO1” and a creation date of Jan. 27, 2022, and having a size of 727 kb. The sequence listing submitted via EFS-Web is part of the specification and is herein incorporated by reference in its entirety.

### BACKGROUND OF THE INVENTION

[0004] Hereditary angioedema (HAE), also referred to as C1 esterase inhibitor deficiency, C1 inhibitor deficiency, HANE, Quincke edema, and secondary angioneurotic edema, is a rare and potentially life-threatening autosomal dominant genetic disease that occurs in about 1 in 50,000 people. HAE is characterized by recurrent episodes of swelling that most often affect the skin or mucosal tissues of the upper respiratory and gastrointestinal tracts (Banerji, Ann Allergy Asthma Immunol, 111: 329-336 (2013); Aygoren-Pursun et al., Orphanet J Rare Dis., 9: 99 (2014)).

[0005] HAE occurs when plasma leaks through the blood vessels into tissues as a result of the overproduction of bradykinin. It is thought that the disease mechanism involves cleavage of prekallikrein (PKK) by activated factor XII (F12), and releasing active plasma kallikrein, which activates more F12. Plasma kallikrein then cleaves kininogen, releasing bradykinin, which binds to the B2 bradykinin receptor on endothelial cells, increasing the permeability of the endothelium. Normally, the C1 esterase inhibitor (encoded by the SERPING1 gene) controls bradykinin production by inhibiting plasma kallikrein and the activation of F12. (Busse et al., N Engl J Med., 382(12): 1136-1148 (2020)).

[0006] There are two types of HAE: HAE-C1-INH and HAE-nl-C1-INH. HAE-C1-INH results from mutations in the SERPING1 gene (encoding C1 inhibitor), resulting in low levels of active C1 inhibitor in the blood. Two subtypes of HAE-C1-INH exist: Type 1 HAE accounts for 85% of cases and is caused by the inability of the mutated C1 inhibitor protein to be secreted into the blood, and Type II HAE accounts for the remaining 15% of cases and is caused by a secreted but dysfunctional mutated C1 inhibitor. HAE-nl-C1-INH was first described in 2000 and is not yet fully understood. Some patients with HAE-nlC1-INH have a mutation in coagulation factor XII, but most patients do not have a known mutation, and the C1 inhibitor gene is normal. (website: www.angioedemacenter.com/patient-resources/angioedema-types/).

[0007] Currently, therapeutic agents are indicated for long-term prophylaxis, therapy for acute attacks and short-term prophylaxis (e.g., prior to dental surgery), and include agents such as danazol, which has a high adverse effect profile, plasma-derived or recombinant C1 inhibitor replacement protein, bradykinin receptor antagonists (such as icatibant), kallikrein inhibitors (such as ecallantide), fresh frozen plasma, and purified C1 inhibitor. These therapies can alleviate symptoms and maximize quality of life; however, disease recurrence and the need for long-term continued administration remains a major obstacle to therapy (Aberer, Ann Med, 44: 523-529 (2012); Charignon et al., Expert Opin Pharmacother, 13: 2233-2247 (2012); Papadopoulou-Alataki, Curr Opin Allergy Clin Immunol, 10: 20-25 (2010); Parikh et al., Curr Allergy Asthma Rep, 11: 300-308 (2011); Tourangeau et al., Curr Allergy Asthma Rep, 11: 345-351 (2011); Bowen et al., Ann Allergy Asthma Immunol, 100: S30-S40 (2008); Frank, Immunol Allergy Clin North Am, 26: 653-668 (2006); Cicardi et al., J Allergy Clin Immunol, 99: 194-196 (1997); Kreuz et al., Transfusion 49: 1987-1995 (2009); Bork et al., Ann Allergy Asthma Immunol, 100: 153-161 (2008); and Cicardi et al., JAllergy Clin Immunol, 87: 768-773 (1991)).

[0008] There is a need for effective and long-lasting therapeutic approaches to treat angioedema associated with C1 inhibitor and F12 deficiency.

### BRIEF SUMMARY OF THE INVENTION

[0009] Disclosed herein are optimized cassettes for liver-directed expression of a secretable version of human C1 inhibitor. These optimizations to the cassettes lead to an increase in C1 inhibitor secretion from liver and enable hepatic gene transfer to achieve circulating levels of C1 inhibitor sufficient to cross-correct C1 inhibitor deficiency systemically in subjects. These cassettes are useful as a gene therapy treatment of subjects with hereditary angioedema (HAE) and other diseases and disorders treatable with C1 inhibitor.

[0010] In one general aspect, the instant invention relates to a polynucleotide comprising a nucleic acid encoding a C1 inhibitor, wherein the nucleic acid is selected from the group consisting of: (1) a polynucleotide having at least 83% sequence identity to the sequence of SEQ ID NO: 105; (2) a polynucleotide having at least 83% sequence identity to the sequence of SEQ ID NO: 106; (3) a polynucleotide having at least 80% sequence identity to the sequence of SEQ ID NO: 107; (4) a polynucleotide having at least 80% sequence identity to the sequence of SEQ ID NO: 108; (5) a polynucleotide having at least 83% sequence identity to the sequence of SEQ ID NO: 109; (6) a polynucleotide having at least 84% sequence identity to the sequence of SEQ ID NO: 110; (7) a polynucleotide having at least 80% sequence identity to the sequence of SEQ ID NO: 111; (8) a polynucleotide having at least 83% sequence identity to the sequence of SEQ ID NO: 112; (9) a polynucleotide having at least 82% sequence identity to the sequence of SEQ ID NO: 113; (10) a polynucleotide having at least 82% sequence identity to the sequence of SEQ ID NO: 114; (11) a polynucleotide having at least 82% sequence identity to the sequence of SEQ ID NO: 115; (12) a polynucleotide having at least 80% sequence identity to the sequence of SEQ ID NO: 116; (13) a polynucleotide having at least 80% sequence identity to the sequence of SEQ ID NO: 117; (14) a polynucleotide having at least 83% sequence identity to the sequence of SEQ ID NO: 118; (15) a polynucleotide having at least 80% sequence identity to the sequence of SEQ ID NO: 119; (16) a polynucleotide having at least 80% sequence identity to the sequence of SEQ ID NO: 120; (17) a polynucleotide having at least 80% sequence identity to the sequence of SEQ ID NO: 121; (18) a polynucleotide having at least 83% sequence identity to the sequence of SEQ ID NO: 122; (19) a polynucleotide having at least 93% sequence identity to the sequence of SEQ ID NO: 123; (20) a polynucleotide having at least 92% sequence identity to the sequence of SEQ ID NO: 124; (21) a polynucleotide having at least 89% sequence identity to the sequence of SEQ ID NO: 125; (22) a polynucleotide having at least 86% sequence identity to the sequence of SEQ ID NO: 126; (23) a polynucleotide having at least 92% sequence identity to the sequence of SEQ ID NO: 127; (24) a polynucleotide having at least 89% sequence identity to the sequence of SEQ ID NO: 128; (25) a polynucleotide having at least 89% sequence identity to the sequence of SEQ ID NO: 129; (26) a polynucleotide having at least 91% sequence identity to the sequence of SEQ ID NO: 130; (27) a polynucleotide having at least 92% sequence identity to the sequence of SEQ ID NO: 131; (28) a polynucleotide having at least 93% sequence identity to the sequence of SEQ ID NO: 132; (29) a polynucleotide having at least 93% sequence identity to the sequence of SEQ ID NO: 133; (30) a polynucleotide having at least 87% sequence identity to the sequence of SEQ ID NO: 134; (31) a polynucleotide having at least 89% sequence identity to the sequence of SEQ ID NO: 135; (32) a polynucleotide having at least 93% sequence identity to the sequence of SEQ ID NO: 136; (33) a polynucleotide having at least 93% sequence identity to the sequence of SEQ ID NO: 137; (34) a polynucleotide having at least 87% sequence identity to the sequence of SEQ ID NO: 138; (35) a polynucleotide having at least 86% sequence identity to the sequence of SEQ ID NO: 139; (36) a polynucleotide having at least 86% sequence identity to the sequence of SEQ ID NO: 140; and (37) a polynucleotide having at least 86% sequence identity to the sequence of SEQ ID NO: 141, optionally, the C1 inhibitor comprises the amino acid sequence of SEQ ID NO: 181 (mature C1 inhibitor; no signal peptide) or 192 (nascent C1 inhibitor; includes signal peptide).

[0011] In certain embodiments, the nucleic acid contains fewer than 24 CpG dinucleotides, optionally 0 CpG dinucleotides.

[0012] In certain embodiments, the nucleic acid encoding the C1 inhibitor has a sequence at least 85%, at least 90%, at least 95% or 100% to any one of SEQ ID NOs: 105-142, 145-147, 156, 171, 172, 230 and 231.

[0013] In certain embodiments, the instant invention relates to a nucleic acid encoding a variant C1 inhibitor, wherein the variant C1 inhibitor comprises a truncated C1 inhibitor, a fusion of two or more C1 inhibitors, or a fusion of a C1 inhibitor with an Fc region or domain.

[0014] In certain embodiments, the nucleic acid has a sequence of any one of SEQ ID NOs: 143-144, 158, and 165-170, optionally the variant C1 inhibitor comprises an amino acid sequence of any one of SEQ ID NOs: 193-201, or a variant thereof.

[0015] In certain embodiments, the polynucleotide comprises a signal peptide sequence positioned at the 5′ end of the nucleic acid encoding the C1 inhibitor.

[0016] In certain embodiments, the signal peptide sequence is a heterologous signal peptide sequence.

[0017] In certain embodiments, the signal peptide sequence is an endogenous or native C1 inhibitor signal peptide sequence.

[0018] In certain embodiments, the signal peptide is selected from the group consisting of C1 inhibitor signal peptide, human chymotrypsinogen B2 signal peptide, ALB signal peptide, ORM1 signal peptide, TF signal peptide, AMBP signal peptide, LAMP1 signal peptide, BTN2A2 signal peptide, CD300 signal peptide, NOTCH2 signal peptide, STRC signal peptide, AHSG signal peptide, SYN1 signal peptide, SYN2 signal peptide, SYN3 signal peptide, and SYN4 signal peptide, or a variant thereof.

[0019] In certain embodiments, the signal peptide has a coding sequence of one of SEQ ID NOs: 84-103, optionally the signal peptide comprises an amino acid sequence of any one of SEQ ID NOs: 203-218, or a variant thereof.

[0020] In certain embodiments, the instant invention relates to a signal peptide comprising a sequence of any one of SEQ ID NOs: 215-218.

[0021] In certain embodiments, the instant invention relates to a nucleic acid encoding a signal peptide, wherein the nucleic acid comprises a sequence of any one of SEQ ID NOs: 100-103.

[0022] In certain embodiments, a signal peptide of the instant invention follows any one, two, three, or all four of the following rules: (1) an amino-terminal N-region of 2-5 amino acids with a net positive charge, (2) a hydrophobic H-region of 6-15 amino acids, (3) a carboxyl-terminal C-region of 5-10 amino acids, with the amino acid in the −3 position from the C-terminus of the signal peptide having no charge, and the amino acid in the −1 position from the C-terminus of the signal peptide containing a short side chain, and (4) a leucine residue at the −10 position from the C-terminus of the signal peptide.

[0023] In certain embodiments, the instant invention relates to an expression cassette comprising the polynucleotide comprising the nucleic acid encoding C1 inhibitor, operably linked to an expression control element.

[0024] In certain embodiments, the expression control element is a liver-specific expression control element.

[0025] In certain embodiments, the expression cassette further comprises one or more tissue specificity elements, wherein a tissue specificity element is a promoter, and wherein the promoter is optionally an hAAT promoter sequence.

[0026] In certain embodiments, the expression cassette further comprises one or more potency elements, wherein a potency element is an enhancer or a polyA sequence, and wherein the enhancer is selected from the group consisting of ApoE, 2×ApoE, 4×ApoE, hAAT enhancer, WPRE, WPRE3, and an intron that is optionally a human hemoglobin 3 (HBB)-derived intron, and wherein the polyA sequence is optionally a bovine growth hormone (bGH) polyadenylation (polyA) sequence.

[0027] In certain embodiments, the expression control element of the expression cassette is positioned 5′ of the polynucleotide, wherein the expression control element optionally comprises an ApoE/hAAT enhancer/promoter sequence.

[0028] In certain embodiments, the expression cassette further comprises one or more response elements, wherein a response element is a miRNA binding site, a regulated Irel-dependent decay (RIDD) sequence that drives degradation of mRNA, an acute phase response element (APRE), or another 5′ or 3′ UTR sequence, and wherein the miRNA binding site is optionally miR-142-3p, the RIDD sequence is selected from the group consisting of 1×RIDD, 3×RIDD, and RIDD1×Blos, the APRE is selected from the group consisting of SERPING1 5′ UTR, APRE 5′ UTR, and SAA2 5′ UTR, and the other 5′ or 3′ UTR sequence is optionally a SAA2 3′ UTR sequence.

[0029] In certain embodiments, the tissue specificity element(s), potency element(s), and/or response element(s) are CpG-reduced compared to the wild-type tissue specificity element(s), potency element(s), and/or response element(s).

[0030] In certain embodiments, the instant invention relates to an adeno-associated virus (AAV) vector comprising the polynucleotide or expression cassette.

[0031] In certain embodiments, the AAV vector comprises: (a) one or more of an AAV capsid, and (b) one or more AAV inverted terminal repeats (ITRs), wherein the AAV ITR(s) flanks the 5′ and/or 3′ terminus of the polynucleotide or the expression cassette.

[0032] In certain embodiments, at least one or more of the ITRs of the AAV vector is modified to have reduced CpGs.

[0033] In certain embodiments, the AAV vector has a capsid serotype comprising a modified or variant AAV VP1, VP2 and/or VP3 capsid having 90% or more, 95% or more, or 100% sequence identity to AAV1, AAV2, AAV3, AAV4, AAV5, AAV6, AAV7, AAV8, AAV9, AAV10, AAV11, AAV12, Rh10, Rh74 (SEQ ID NO: 188), AAV3B, AAV-2i8, SEQ ID NO: 226, SEQ ID NO: 189, SEQ ID NO: 190, and/or LK03 (SEQ ID NO: 191)

[0034] In certain embodiments, the AAV vector comprises one or more ITRs of any of AAV1, AAV2, AAV3, AAV4, AAV5, AAV6, AAV7, AAV8, AAV9, AAV10, AAV11, AAV12, Rh10, Rh74, AAV3B, AAV serotypes, or a combination thereof.

[0035] In certain embodiments, the instant invention relates to an AAV vector comprising,
[0036] (1) a 5′ AAV ITR, optionally a 5′ ITR of AAV2, optionally a 5′ ITR comprising the polynucleotide sequence of SEQ ID NO: 70 or 72;
[0037] (2) one or more tissue specificity elements, wherein the tissue specificity element is a promoter, optionally the promoter comprises the polynucleotide sequence of SEQ ID NO: 79 or 80;
[0038] (3) one or more potency elements, wherein the one or more potency elements are enhancers or polyA sequences, optionally wherein the one or more potency elements have a polynucleotide sequence selected from the group consisting of SEQ ID NOs: 225, 74-76, 81-83, and 173-178;
[0039] (4) one or more response elements, wherein the one or more response elements are miRNA binding sites, regulated Irel-dependent decay (RIDD) sequences, acute phase response elements (APREs), or a 5′ or 3′ UTR sequence, optionally wherein the one or more response elements have a polynucleotide sequence selected from the group consisting of SEQ ID NOs: 77-78, and 179, 180, and 182-187;
[0040] (5) a nucleic acid encoding a signal peptide, optionally the signal peptide comprising an amino acid sequence selected from the group consisting of SEQ ID NOs: 203-218, optionally a polynucleotide sequence selected from the group consisting of SEQ ID NOs: 84-103;
[0041] (6) a nucleic acid encoding at least one of a C1 inhibitor, a variant C1 inhibitor, and a fusion or combination thereof,
   [0042] a. optionally, a C1 inhibitor having the amino acid sequence of SEQ ID NO: 181 or 192, optionally a polynucleotide sequence selected from the group consisting of SEQ ID NOs: 104-142, 145-147, 156, and 171-172;
   [0043] b. optionally, a variant C1 inhibitor having an amino acid sequence selected from the group consisting of SEQ ID NOs: 193-201, optionally a polynucleotide selected from the group consisting of SEQ ID NOs: 143-144, 158, and 165-170; and
[0044] (7) a 3′ AAV ITR, optionally a 3′ ITR of AAV2, optionally a 3′ ITR comprising the polynucleotide sequence of SEQ ID NO: 71 or 73.

[0045] In certain embodiments, the AAV vector comprises the polynucleotide sequence of one of SEQ ID NOs: 1-69 and 227-229.

[0046] In certain embodiments, the instant invention relates to a non-viral vector comprising the polynucleotide or expression cassette.

[0047] In certain embodiments, the instant invention relates to a pharmaceutical composition comprising a plurality of the AAV vectors or non-viral vectors in a biologically compatible carrier or excipient.

[0048] In certain embodiments, the pharmaceutical composition further comprises empty AAV capsids.

[0049] In certain embodiments, the pharmaceutical composition further comprises a surfactant.

[0050] In certain embodiments, the instant invention relates to a method of treating a subject in need of C1 inhibitor, comprising administering to the subject a therapeutically effective amount of the polynucleotide, the expression cassette, the AAV vector, the non-viral vector, or the pharmaceutical composition, wherein the C1 inhibitor is expressed in the subject.

[0051] In certain embodiments, the subject is human.

[0052] In certain embodiments, the subject has hereditary angioedema (HAE).

[0053] In certain embodiments, the polynucleotide, expression cassette, AAV vector, non-viral vector, or pharmaceutical composition is administered to the subject intravenously, intra-arterially, intra-cavity, intra-mucosally, or via catheter.

[0054] In certain embodiments, the AAV vector is administered to the subject in a range from about 1×10⁸ to about 1×10¹⁴ vector genomes per kilogram (vg/kg) of the weight of the subject.

[0055] In certain embodiments, the method reduces, decreases or inhibits one or more symptoms of the need for C1 inhibitor or of HAE; or prevents or reduces progression or worsening of one or more symptoms of the need for C1 inhibitor or of HAE; or stabilizes one or more symptoms of the need for C1 inhibitor or of HAE; or improves one or more symptoms of the need for C1 inhibitor or of HAE.

[0056] In certain embodiments, the instant invention relates to a cell comprising a polynucleotide or expression cassette of the instant invention.

[0057] In certain embodiments, the instant invention relates to a cell that produces an AAV vector of the instant invention.

[0058] In certain embodiments, the instant invention relates to a method of producing an AAV vector of the instant invention, comprising (a) introducing an AAV vector genome comprising the polynucleotide or expression cassette of the instant invention into a packaging helper cell; and (b) culturing the helper cell under conditions to produce the AAV vector.

### BRIEF DESCRIPTION OF THE DRAWINGS

[0059] The foregoing summary, as well as the following detailed description of the instant invention, will be better understood when read in conjunction with the appended drawings. It should be understood that the instant invention is not limited to the precise embodiments shown in the drawings.

[0060] FIG. 1 shows a schematic of an exemplary expression vector described herein.

[0061] FIG. 2 shows graphs depicting the mean±SD C1-INH antigen levels in mouse plasma for the low dose (1.0×10¹² vg/kg, Groups 7-11) (FIG. 2A) and high dose (4.0×10¹² vg/kg, Groups 1-5) (FIG. 2B) vector cohorts of Example 2 as measured by ELISA; the gray shaded region signifies the mean±SD of all PNP measurements (low dose: 170.30±20.36 μg/mL; high dose: 181.0±35.62 μg/mL); values considered above and below the limits of quantitation were excluded from calculations of mean±SD; SERPING1=SEQ ID NO: 1, Syn1=SEQ ID NO: 13, Syn4=SEQ ID NO: 16, AHSG=SEQ ID NO: 12, sp7=SEQ ID NO: 2.

[0062] FIG. 3 shows graphs depicting the steady-state C1-INH antigen levels in mouse plasma for the low dose (1.0×10¹² vg/kg, Groups 7-11) (FIG. 3A) and high dose (4.0×10¹² vg/kg, Groups 1-5) (FIG. 3B) vector cohorts of Example 2, presented as mean±SD; steady-state was defined as no statistically significant difference in mean antigen levels across assessed timepoints (linear regression analysis not shown); statistical comparison relative to native SERPING1 signal peptide was performed by Kruskal-Wallis test with post-hoc Dunn's multiple comparisons test (ns, not significant; *, p<0.05; **, p<0.01; ***, p<0.001; ****, p<0.0001); SERPING1=SEQ ID NO: 1, Syn1=SEQ ID NO: 13, Syn4=SEQ ID NO: 16, AHSG=SEQ ID NO: 12, sp7=SEQ ID NO: 2.

[0063] FIG. 4 shows a graph depicting C1-INH activity in mouse plasma from the high dose cohort of Example 2, specifically, individual C1-INH activity values are shown for the high dose cohort, with data from Weeks 22, 25, and 27 included (circles, triangles, and squares, respectively), with values presented as mean±SD; statistical comparison relative to native SERPING1 signal peptide was performed by one-way ANOVA with post-hoc Dunnett's multiple comparisons test (****, p<0.0001); SERPING1=SEQ ID NO: 1, Syn1=SEQ ID NO: 13, Syn4=SEQ ID NO: 16, AHSG=SEQ ID NO: 12, sp7=SEQ ID NO: 2.

[0064] FIG. 5 shows a graph depicting correlation of C1-INH antigen with C1-INH activity in mouse plasma from the high dose cohort of Example 2, specifically, individual values for C1-INH activity are plotted relative to each animal's respective C1-INH antigen level, with the C1-INH activity and antigen measured by a chromogenic assay and ELISA, respectively, with data from Weeks 22, 25, and 27; values were log 10 transformed, and a linear fit was generated using regression analysis (R²=0.771), a two-tailed Pearson correlation indicated significance (Pearson r=0.8778; p<0.0001); SERPING1=SEQ ID NO: 1, Syn1=SEQ ID NO: 13, Syn4=SEQ ID NO: 16, AHSG=SEQ ID NO: 12, sp7=SEQ ID NO: 2.

[0065] FIG. 6 shows graphs depicting vector genome concentration from terminal liver tissue of Example 2, with the vector genome copy numbers normalized to mouse Foxp1 in the low dose (FIG. 6A) and high dose (FIG. 6B) cohorts, with values are reported as BGHpA copies per Foxp1 copies and presented as mean±SD; statistical comparison relative to native SERPING1 signal peptide was performed by Kruskal-Wallis test with post-hoc Dunn's multiple comparisons test (**, p<0.01; ***, p<0.001); terminus was defined as Week 18 for the low dose cohort (Groups 7-11) and Week 28 for the high dose cohort (Groups 1-5); SERPING1=SEQ ID NO: 1, Syn1=SEQ ID NO: 13, Syn4=SEQ ID NO: 16, AHSG=SEQ ID NO: 12, sp7=SEQ ID NO: 2.

[0066] FIG. 7 shows a graph depicting correlation of C1-INH antigen with vector genome concentration at terminus of Example 2, with terminal C1-INH antigen values versus vector genome concentration (normalized to Foxp1) at terminus in individual mice; terminus was defined as Week 18 for the lower dose cohort (Groups 7-11) and Week 28 for the higher dose cohort (Groups 1-5); values were log 10 transformed and a linear fit was generated using regression analysis (R²=0.866); a two-tailed Pearson correlation indicated significance (Pearson r=0.9306; p<0.0001); SERPING1=SEQ ID NO: 1, Syn1=SEQ ID NO: 13, Syn4=SEQ ID NO: 16, AHSG=SEQ ID NO: 12, sp7=SEQ ID NO: 2.

[0067] FIG. 8 shows a graph depicting steady state C1-INH antigen levels relative to vector genome concentration at terminus of Example 2, with steady state C1-INH antigen levels plotted with respect to terminal liver vector genome (VG) concentration (normalized to Foxp1) in the low dose (FIG. 8A) and high dose (FIG. 8B) cohorts; steady-state C1-INH antigen was defined as no statistically significant difference in levels across the timepoints tested (statistical analysis not shown, Weeks 3-18 and Weeks 3-28 for low and high dose cohorts, respectively); values are presented as mean±SD; statistical comparison relative to native SERPING1 signal peptide was performed by Kruskal-Wallis test with post-hoc Dunn's multiple comparisons test (*, p<0.05); terminus was defined as Week 18 for the lower dose cohort (Groups 7-11) and Week 28 for the higher dose cohort (Groups 1-5); SERPING1=SEQ ID NO: 1, Syn1=SEQ ID NO: 13, Syn4=SEQ ID NO: 16, AHSG=SEQ ID NO: 12, sp7=SEQ ID NO: 2.

[0068] FIG. 9 shows graphs depicting the C1-INH antigen levels in mouse plasma for Studies A (FIG. 9A) and B (FIG. 9B) of Example 3 as measured by ELISA; groups were followed for 7 weeks (Study A) or 6 weeks (Study B) following vector administration; the gray shaded region signifies the mean±SD of all PNP measurements (Study A, 179.2±20.88 μg/mL; Study B, 165.9±20.70 μg/mL); SERPING1=SEQ ID NO: 1, 13=SEQ ID NO: 18, 14=SEQ ID NO: 19, 17=SEQ ID NO: 20, 120=SEQ ID NO: 21, 121=SEQ ID NO: 22, 124=SEQ ID NO: 23; 12=SEQ ID NO: 17, H9=SEQ ID NO: 24, H13=SEQ ID NO: 25, BC2=SEQ ID NO: 26.

[0069] FIG. 10 shows graphs depicting the steady-state C1-INH antigen levels in mouse plasma for Studies A (FIG. 10A) and B (FIG. 10B) as measured by ELISA; groups were followed for 7 weeks (Study A) or 6 weeks (Study B) following vector administration; values are presented as mean±SD; statistical comparison relative to AAV-encapsidated SEQ ID NO: 1 was performed by one-way ANOVA with post-hoc Dunnett's multiple comparisons test (*, p<0.05; **, p<0.01; ***, p<0.001); SERPING1=SEQ ID NO: 1, 13=SEQ ID NO: 18, 14=SEQ ID NO: 19, 17=SEQ ID NO: 20, 120=SEQ ID NO: 21, 121=SEQ ID NO: 22, 124=SEQ ID NO: 23, 12=SEQ ID NO: 17, H9=SEQ ID NO: 24, H13=SEQ ID NO: 25, BC2=SEQ ID NO: 26.

[0070] FIG. 11 shows graphs depicting plasma bradykinin antigen levels in mice at Week 7 as assessed by ELISA; bradykinin was assessed in mice that received AAV-encapsidated SEQ ID NO: 20 (Group 4) and SEQ ID NO: 22 (Group 6) codon optimized variants, which were associated with higher levels of C1-INH antigen expression; FIG. 11A shows summary bradykinin values in the excipient, SEQ ID NO: 20 variant, and SEQ ID NO: 22 variant groups of Study A; the gray shaded region signifies mean±SD of all pooled normal plasma (PNP) measurements (35010.16±8093.98 μg/mL); values are presented as mean±SD; statistical comparison relative to SEQ ID NO: 1 was performed by one-way ANOVA with post-hoc Dunnett's multiple comparisons test (**, p<0.01); FIG. 11B shows individual C1-INH antigen values in AAV-encapsidated SEQ ID NO: 20- and 22-treated mice at Week 7 plotted relative to their respective plasma bradykinin antigen level (n=9 total samples), and a two-tailed Pearson correlation indicated significance for the SEQ ID NO: 22 group (Pearson r=−0.9417, p<0.0168, R²=0.8867); one animal from the excipient group was euthanized prior to study end following presentation of a necrotic tail and head tilt. One animal that received AAV-encapsidated SEQ ID NO: 20 was removed from analysis following use of the ROUT method for outlier identification; 17=SEQ ID NO: 20, 121=SEQ ID NO: 22.

[0071] FIG. 12 shows graphs depicting vector genome concentration in terminal liver tissue for Studies A (FIG. 12A) and B (FIG. 12B) of Example 3, with the vector genome copy numbers normalized to mouse Foxp1 and values presented as mean±SD; study terminus is defined as Week 7 and Week 6 for Studies A and B, respectively; statistical comparison relative to the native SERPING1 transgene was performed by Kruskal-Wallis test with post-hoc Dunn's multiple comparisons test (ns, p>0.05); SERPING1=SEQ ID NO: 1, 13=SEQ ID NO: 18, 14=SEQ ID NO: 19, 17=SEQ ID NO: 20, 120=SEQ ID NO: 21, 121=SEQ ID NO: 22,124=SEQ ID NO: 23, 12=SEQ ID NO: 17, H9=SEQ ID NO: 24, H13=SEQ ID NO: 25, BC2=SEQ ID NO: 26.

[0072] FIG. 13 shows a graph depicting correlation of C1-INH antigen with vector genome concentration at terminus in individual mice; correlation was performed on codon optimized variants from Study A with the highest C1-INH expression; values were log₁₀ transformed and a linear fit was generated using regression analysis (R²=0.7243); a two-tailed Pearson correlation indicated significance (Pearson r=0.8510, p<0.0001); SERPING1=SEQ ID NO: 1, 17=SEQ ID NO: 20, 121=SEQ ID NO: 22, 124=SEQ ID NO: 23.

[0073] FIG. 14 shows a graph depicting steady state C1-INH antigen levels relative to vector genome concentration (normalized to Foxp1) at terminus (Week 7) for Study A of Example 3; steady-state C1-INH antigen was defined as no statistically significant difference in levels across the timepoints tested (statistical analysis not shown, Weeks 3-7); values are presented as mean±SD; statistical comparison relative to native SERPING1 signal peptide was performed by Kruskal-Wallis test with post-hoc Dunn's multiple comparisons test (*, p<0.05); SERPING1=SEQ ID NO: 1, 13=SEQ ID NO: 18, 14=SEQ ID NO: 19, 17=SEQ ID NO: 20, 120=SEQ ID NO: 21, 121=SEQ ID NO: 22, 124=SEQ ID NO: 23.

[0074] FIG. 15 shows graphs depicting C1-INH antigen levels in mouse plasma for the study of Example 4; specifically, C1-INH antigen levels are plotted as a function of time (FIG. 15A) and at week 8 (FIG. 15B) for all groups as measured by ELISA; pooled normal human plasma (PNP) was included as a control to monitor inter-assay variability; gray shaded region signifies the mean±SD of all measurements of PNP (175.4±41.3 μg/mL); values are presented as mean±SD; values below the limit of detection were excluded from calculations of mean±SD; 1 male and 3 females (all low dose) exhibited no detectable C1-INH antigen over the course of the study; 17=SEQ ID NO: 20.

[0075] FIG. 16 shows a graph depicting a correlation of C1-INH antigen with C1-INH activity in mouse plasma for the study of Example 4, specifically, individual values for C1-INH activity are plotted relative to each animal's respective C1-INH antigen level, with data from Weeks 5 and 8; values were log₁₀ transformed, and a linear fit was generated using regression analysis; below quantitation level (BQL) values are excluded while above quantitation level (AQL) values are included for visualization; 17=SEQ ID NO: 20.

[0076] FIG. 17 shows a graph depicting vector genome concentrations from terminal liver tissue for the study of Example 4, specifically, vector genome copy numbers normalized to mouse Foxp1 following administration of one of three doses of AAV-encapsidated SEQ ID NO: 20; values are presented as mean±SD; 17=SEQ ID NO: 20.

[0077] FIG. 18 shows a graph depicting normalized SERPING1 mRNA expression from terminal liver tissue, specifically, mRNA expression levels of SERPING1 normalized to mouse Ppie in mice that received one of three doses of AAV-encapsidated SEQ ID NO: 20; terminus is defined as Week 8; values are presented as mean±SD; 17=SEQ ID NO: 20.

[0078] FIG. 19 shows graphs depicting comparison of vector dose, normalized vector genome concentration, normalized mRNA expression levels, and terminal C1-INH antigen levels for the study of Example 4, specifically, values are plotted for male (FIG. 19A) and female (FIG. 19B) Serping1^{-/-} mice administered varying doses of AAV-encapsidated SEQ ID NO: 20; terminus was defined as Week 8; VG copy numbers were normalized to mouse Foxp1; SERPING1 mRNA expression levels were normalized to mouse Ppie; C1-INH antigen levels were measured by ELISA; individual values were log 10 transformed and fit to a nonlinear 4PL sigmoidal curve; 17=SEQ ID NO: 20.

[0079] FIG. 20 shows data characterizing Serping1 deficiency in a B6.SJL mouse background. FIG. 20A illustrates paw volume differences. FIG. 20B illustrates plasma C1-INH differences. FIG. 20C illustrates bradykinin differences. FIG. 20D illustrates complement C4a (C4a) differences. FIG. 20E illustrates tissue plasminogen activator (tPA) differences.

[0080] FIG. 21 illustrates the ability of I21 (SEQ ID NO: 22) to drive dose-dependent, durable hC1-INH antigen levels in plasma using an HAE model mice. Plasma hC1-INH levels in B6/SJL^{Serpring1+/+} (FIG. 21A), B6/SJL^{Serpring1+/-} (FIG. 21B), and B6/SJL^{Serpring1-/-} (FIG. 21C) male mice were measured after injecting one of three doses of AAV-encapsidated 121, ranging from 1.0×10¹² to 3.16×10¹² vg/kg in quarter-log increments.

[0081] FIG. 22 illustrates C1-INH expression and pharmacodynamics of I21 (SEQ ID NO: 22). FIG. 22A provides data comparing hC1-INH expression in different Serping1 genotypes. FIG. 22B shows hC1-INH dose response. FIG. 22C shows bradykinin dose response. FIG. 22D shows tPA activity dose response.

[0082] FIG. 23 shows I21 (SEQ ID NO: 22) dose-dependent, durable hC1-INH antigen levels in plasma of an HAE model mice. B6/SJL^{Serpring1-/-} male mice were injected with one of five doses of I21, ranging from 9.5×10¹¹ to 3.0×10¹³ vg/kg. FIG. 23A shows plasma C1-INH levels as measured by ELISA as a function of time. Values are in units of IU/mL and presented as mean±SD. FIG. 23B shows steady-state C1-INH antigen levels in B6/SJL^{Serpring1-/-} male mice as a function of vector dose. All values were log₁₀ transformed and a linear fit was generated using regression analysis (R²=0.88).

[0083] FIG. 24 show I21 (SEQ ID NO: 22) mediated reduction in bradykinin using an HAE disease model mice. FIG. 24A shows individual and mean±SD plasma bradykinin levels in different dose cohorts. Statistical comparison relative to excipient was performed by one-way ANOVA with post-hoc Dunnett's multiple comparisons test (**, p<0.01; ***, p<0.001). FIG. 24B shows plasma C1-INH levels.

[0084] FIG. 25 show I21 (SEQ ID NO: 22) mediated C1-INH rescues C4 levels in an HAE mouse model. Plasma C4 was analyzed at study terminus by an automated capillary-based immunoassay system (Wesm, ProteinSimple). FIG. 25A shows individual and mean±SD relative C4 expression in each dose cohort. FIG. 25B shows individual relative plasma C4 values plotted relative to each animal's respective C1-INH antigen level at week 31. All values were log₁₀ transformed and a linear fit was generated using regression analysis (R²=0.87). FIG. 25C shows the level of C4 as a function of plasma C1-INH. BQL refers below the quantitation level. AQL refers to above to quantitation level.

[0085] FIG. 26 shows C1-INH levels produced in mice dosed with AAV-encapsidated 121 (SEQ ID NO: 22), to evaluate toxicology. Male mice were dosed with AAV-encapsidated I21 at 2.5×10¹² vg/kg, 5.0×10¹² vg/kg, or 1.0×10¹³ (FIG. 26A). Female mice were dosed with AAV-encapsidated I21 at 1.0×10¹³ vg/kg, 5.0×10¹³ vg/kg, or 9.9×10¹³ (FIG. 26B).

[0086] FIG. 27 shows a I21 (SEQ ID NO: 22) dosing study in male cynomolgus macaque (FIG. 27A) and female cynomolgus macaque (FIG. 27B), where percent normal C1-INH activity was determined at different time points after AAV-encapsidated I21 administration. Cynomolgus macaque were dosed with AAV-encapsidated I21 at 1.0×10¹³ vg/kg (Low), 3.2×10¹³ vg/kg (Mid) or 1.0×10¹⁴ vg/kg (High).

[0087] FIG. 28 illustrates hC1-INH antigen level (FIG. 28A) and peak percent normal C1-INH activity (FIG. 28B) produced with different doses of AAV-encapsidated 121. Male and female cynomolgus macaque were dosed with AAV-encapsidated I21 at 1.0×10¹³ vg/kg (Low), 3.2×10¹³ vg/kg (Mid) or 1.0×10¹⁴ vg/kg (High).

[0088] FIG. 29 illustrates hC1-INH antigen levels in supernatants of transfected Huh7 cells. Huh7 cells were transfected in vitro with different SERPING1 expression plasmids and hC1-INH antigen levels were measured. Results are the average of biological replicates n=3. Error bars represent standard deviation.

[0089] FIG. 30 illustrates the effect of adding a miR-142-3p target into an expression plasmid. Huh7 cells were transfected in vitro with plasmid containing a nucleic acid of SEQ ID NO: 28 (pSwap-SERPING1_I21) or SEQ ID NO: 55 (mir 142-3p), or pCAG_GFP; and hC1-INH antigen was assayed. Results are the average of biological replicates n=3. Error bars represent standard deviation.

### DETAILED DESCRIPTION OF THE INVENTION

[0090] Various publications, articles and patents are cited or described in the background and throughout the specification; each of these references is herein incorporated by reference in its entirety. Discussion of documents, acts, materials, devices, articles or the like which has been included in the present specification is for the purpose of providing context for the instant invention. Such discussion is not an admission that any or all of these matters form part of the prior art with respect to any inventions disclosed or claimed.

[0091] Unless defined otherwise, all technical and scientific terms used herein have the same meaning commonly understood to one of ordinary skill in the art to which this invention pertains. Otherwise, certain terms cited herein have the meanings as set in the specification.

[0092] It must be noted that as used herein and in the appended claims, the singular forms “a,” “an,” and “the” include plural reference unless the context clearly dictates otherwise.

[0093] Throughout this specification and the claims which follow, unless the context requires otherwise, the word “comprise”, and variations such as “comprises” and “comprising”, will be understood to imply the inclusion of a stated integer or step or group of integers or steps but not the exclusion of any other integer or step or group of integer or step. When used herein the term “comprising” can be substituted with the term “containing” or “including” or sometimes when used herein with the term “having”.

[0094] When used herein “consisting of” excludes any element, step, or ingredient not specified in the claim element, where such element, step or ingredient is related to the claimed invention. When used herein, “consisting essentially of” does not exclude materials or steps that do not materially affect the basic and novel characteristics of the claim. Any of the aforementioned terms of “comprising”, “containing”, “including”, and “having”, whenever used herein in the context of an aspect or embodiment of the instant invention can be replaced with the term “consisting of” or “consisting essentially of” to vary scopes of the disclosure.

[0095] As used herein, the conjunctive term “and/or” between multiple recited elements is understood as encompassing both individual and combined options. For instance, where two elements are conjoined by “and/or”, a first option refers to the applicability of the first element without the second. A second option refers to the applicability of the second element without the first. A third option refers to the applicability of the first and second elements together. Any one of these options is understood to fall within the meaning, and therefore satisfy the requirement of the term “and/or” as used herein. Concurrent applicability of more than one of the options is also understood to fall within the meaning, and therefore satisfy the requirement of the term “and/or.”

[0096] All of the features disclosed herein can be combined in any combination. Each feature disclosed in the specification can be replaced by an alternative feature serving a same, equivalent, or similar purpose. Thus, unless expressly stated otherwise, disclosed features are an example of a genus of equivalent or similar features.

[0097] The term “about” as used herein refers to a value within 10% of the underlying parameter (i.e., plus or minus 10%). For example, “about 1:10” means 1.1:10.1 or 0.9:9.9, and about 5 hours means 4.5 hours or 5.5 hours, etc. The term “about” at the beginning of a string of values modifies each of the values by 10%.

[0098] All numerical values or numerical ranges include integers within such ranges and fractions of the values or the integers within ranges unless the context clearly indicates otherwise. Thus, to illustrate, reference to reduction of 95% or more includes 95%, 96%, 97%, 98%, 99%, 100% etc., as well as 95.1%, 95.2%, 95.3%, 95.4%, 95.5%, etc., 96.1%, 96.2%, 96.3%, 96.4%, 96.5%, etc., and so forth. Thus, to also illustrate, reference to a numerical range, such as “1-4” includes 2, 3, as well as 1.1, 1.2, 1.3, 1.4, etc., and so forth. For example, “1 to 4 weeks” includes 7, 8, 9, 10, 11, 12, 13, 14, 15, 16, 17, 18, 19, 20, 21, 22, 23, 24, 25, 26, 27, or 28 days.

[0099] Further, reference to a numerical range, such as “0.01 to 10” includes 0.011, 0.012, 0.013, etc., as well as 9.5, 9.6, 9.7, 9.8, 9.9, etc., and so forth. For example, a dosage of about “0.01 mg/kg to about 10 mg/kg” body weight of a subject includes 0.011 mg/kg, 0.012 mg/kg, 0.013 mg/kg, 0.014 mg/kg, 0.015 mg/kg etc., as well as 9.5 mg/kg, 9.6 mg/kg, 9.7 mg/kg, 9.8 mg/kg, 9.9 mg/kg etc., and so forth.

[0100] Reference to an integer with more (greater) or less than includes any number greater or less than the reference number, respectively. Thus, for example, reference to more than 2 includes 3, 4, 5, 6, 7, 8, 9, 10, 11, 12, 13, 14, 15, etc., and so forth. For example, administration of a non-viral vector and/or immune cell modulator “two or more” times includes 3, 4, 5, 6, 7, 8, 9, 10, 11, 12, 13, 14, 15, or more times.

[0101] Further, reference to a numerical range, such as “1 to 90” includes 1.1, 1.2, 1.3, 1.4, 1.5, etc., as well as 81, 82, 83, 84, 85, etc., and so forth. For example, “between about 1 minute to about 90 days” includes 1.1 minutes, 1.2 minutes, 1.3 minutes, 1.4 minutes, 1.5 minutes, etc., as well as one day, 2 days, 3 days, 4 days, 5 days . . . 81 days, 82 days, 83 days, 84 days, 85 days, etc., and so forth.

[0102] In an attempt to help the reader of the application, the description has been separated into various paragraphs or sections, or is directed to various embodiments of the instant invention. These separations should not be considered as disconnecting the substance of a paragraph or section or embodiments from the substance of another paragraph or section or embodiments. To the contrary, one skilled in the art will understand that the description has broad application and encompasses all the combinations of the various sections, paragraphs and sentences that can be contemplated. The discussion of any embodiment is meant only to be exemplary and is not intended to suggest that the scope of the disclosure, including the claims, is limited to these examples.

[0103] Provided herein are modified nucleic acids encoding C1 inhibitor, expression cassettes comprising the modified nucleic acids encoding C1 inhibitor, viral vectors comprising the modified nucleic acids encoding C1 inhibitor, and non-viral vectors comprising the modified nucleic acids encoding C1 inhibitor. The instant invention also provides recombinant AAV particles comprising the modified nucleic acids encoding C1 inhibitor, non-viral particles comprising the modified nucleic acids encoding C1 inhibitor, pharmaceutical compositions comprising the modified nucleic acids encoding C1 inhibitor, and methods of treating Hereditary angioedema (HAE).

### Nucleic Acids

[0104] The terms “nucleic acid” and “polynucleotide” are used interchangeably herein to refer to all forms of nucleic acid, oligonucleotides, including deoxyribonucleic acid (DNA) and ribonucleic acid (RNA). Nucleic acids include genomic DNA, cDNA, antisense DNA/RNA, plasmid DNA, linear DNA, (poly- and oligo-nucleotide), chromosomal DNA, spliced or unspliced mRNA, rRNA, tRNA inhibitory DNA or RNA (RNAi, e.g., small or short hairpin (sh)RNA, microRNA (miRNA), small or short interfering (si)RNA, trans-splicing RNA, or antisense RNA), locked nucleic acid analogue (LNA), oligonucleotide DNA (ODN) single and double stranded, immunostimulating sequence (ISS), riboswitches and ribozymes.

[0105] Nucleic acids include naturally occurring, synthetic, and intentionally modified or altered polynucleotides. Nucleic acids can be single, double, or triplex, linear or circular, and can be of any length. In discussing nucleic acids, a sequence or structure of a particular polynucleotide can be described herein according to the convention of providing the sequence in the 5′ to 3′ direction.

[0106] According to certain embodiments, the polynucleotide is a single-stranded (ssDNA) or a double-stranded DNA (dsDNA) molecule. According to certain embodiments, the polynucleotide is for therapeutic use, e.g., an ssDNA or dsDNA encoding a therapeutic transgene. According to certain embodiments, the dsDNA molecule is a minicircle, a nanoplasmid, open linear duplex DNA or a closed-ended linear duplex DNA (CELiD/ceDNA/doggybone DNA). According to certain embodiments, the ssDNA molecule is a closed circular or an open linear DNA.

[0107] A “transgene” is used herein to conveniently refer to a nucleic acid that is intended or has been introduced into a cell or organism. Transgenes include any nucleic acid, such as a heterologous polynucleotide sequence, such as a modified nucleic acid encoding C1 inhibitor, or a heterologous nucleic acid encoding a protein or peptide or a nucleic acid (e.g., miRNA, etc.). The term transgene and heterologous nucleic acid/polynucleotide sequences are used interchangeably herein.

[0108] As used herein, the term “C1-inhibitor” or “C1 esterase inhibitor” or “C1-INH” or “C1EI” or “SERPING1” are all used interchangeably and refer to any nucleic acid or protein of SERPING1 or C1 inhibitor. In certain embodiments, a nucleic acid encoding a C1 inhibitor encodes a human C1 inhibitor protein. A full DNA sequence of SERPING1, including introns and exons, is available in GenBank Accession No. NG_009625.1. A human C1 inhibitor consists of 500 amino acids and is available in GenBank Accession No. NP_000053.2. Examples of C1 inhibitor include any naturally occurring C1 inhibitor, and variants thereof. As used herein, “a nucleic acid encoding a C1 inhibitor” refers to a recombinant nucleic acid molecule that encodes a protein having at least part of a function or activity of wild-type C1 inhibitor protein. Examples of such nucleic acid include modified nucleic acid encoding C1 inhibitor.

[0109] As used herein, the term “variant protein” refers to any protein that contains one or more changes in the amino acid sequence compared to that of the wild-type. The term “variant protein” includes, e.g., amino acid insertions, additions, substitutions and deletions. The term “variant” also encompasses, e.g., fusion proteins.

[0110] According to certain embodiments, a variant C1 inhibitor exhibits the function of the native protein. In certain embodiments, the variant C1 inhibitor exhibits at least 50%, optionally at least 55%, optionally at least 60%, optionally at least 65%, optionally at least 70%, optionally at least 75%, optionally at least 80%, optionally at least 85%, optionally at least 90%, optionally at least 95% of the function of the native protein. Determination of functional activity of a variant C1 inhibitor protein can be conducted, for example, by assessing inhibition of the esterase activity of complement component C1. Any suitable method known to those skilled in the art in view of the present disclosure can be used in the instant invention. Examples of methods that can be used to determine the functional activity of a variant C1 inhibitor protein include, e.g., spectrophotometric assays, such as that described in Drouet et al., Clin Chim Acta, 1988, 174(2):121-130, enzyme immunoassays, such as that described by the Mayo Clinic (website: www.mayocliniclabs.com/test-catalog/Performance/81493), chromogenic assays, such as that described in Munkvad et al., Clin Chem., 1990, 36(5):737-41, each of the references hereby incorporated by reference in its entirety, and commercially available methods such as those described in the Examples herein.

[0111] As used herein, the term “fusion protein” or “chimeric protein” refers to a protein created through the joining of two or more originally separate proteins, or portions thereof. In certain embodiments, a linker or spacer is present between each protein.

[0112] As used herein, the terms “modify” and grammatical variations thereof, mean that a nucleic acid or protein deviates from a reference or parental sequence. A modified nucleic acid encoding C1 inhibitor has been altered compared to reference (e.g., wild-type) or parental nucleic acid. Modified nucleic acids can therefore have substantially the same, greater or less activity or function than a reference or parental nucleic acid, but at least retain partial activity, function and or sequence identity to the reference or parental nucleic acid. The modified nucleic acid can be genetically modified to encode a modified or variant C1 inhibitor.

[0113] A “modified nucleic acid encoding C1 inhibitor” means that the C1 inhibitor nucleic acid has alteration compared the parental unmodified nucleic acid encoding C1 inhibitor. A particular example of a modification is a nucleotide substitution. Nucleotide substitutions can be silent mutations that code for the same amino acid, or missense mutations that code for a different amino acid. Missense mutations can be conservative or non-conservative mutations. Other examples of modifications include, e.g., truncations and insertions. The modified nucleic acid can also include a codon optimized nucleic acid that encodes the same protein as that of the wild-type protein or of the nucleic acid that has not been codon optimized. Codon optimization can be used in a broader sense, e.g., including removing the CpGs. The terms “modification” herein need not appear in each instance of a reference made to a nucleic acid encoding C1 inhibitor.

[0114] In certain embodiments, for a modified nucleic acid encoding C1 inhibitor, the C1 inhibitor protein retains at least part of a function or activity of wild-type C1 inhibitor.

[0115] As set forth herein, modified nucleic acids encoding C1 inhibitor can exhibit different features or characteristics compared to a reference or parental nucleic acid. For example, modified nucleic acids include sequences with 100% identity to a reference nucleic acid encoding C1 inhibitor as set forth herein, as well as sequences with less than 100% identity to a reference nucleic acid encoding C1 inhibitor.

[0116] The terms “identity,” “homology,” and grammatical variations thereof, mean that two or more referenced entities are the same, when they are “aligned” sequences. Thus, by way of example, when two nucleic acids are identical, they have the same sequence, at least within the referenced region or portion. The identity can be over a defined area (region or domain) of the sequence.

[0117] An “area” or “region” of identity refers to a portion of two or more referenced entities that are the same. Thus, where two protein or nucleic acid sequences are identical over one or more sequence areas or regions they share identity within that region. An “aligned” sequence refers to multiple protein (amino acid) or nucleic acid sequences, often containing corrections for missing or additional bases or amino acids (gaps) as compared to a reference sequence.

[0118] The identity can extend over the entire length or a portion of the sequence. In certain embodiments, the length of the sequence sharing the percent identity is 2, 3, 4, 5 or more contiguous amino acids or nucleic acids, e.g., 6, 7, 8, 9, 10, 11, 12, 13, 14, 15, 16, 17, 18, 19, 20, etc. contiguous nucleic acids or amino acids. In certain embodiments, the length of the sequence sharing identity is 21 or more contiguous amino acids or nucleic acids, e.g., 21, 22, 23, 24, 25, 26, 27, 28, 29, 30, 31, 32, 33, 34, 35, 36, 37, 38, 39, 40, etc. contiguous amino acids or nucleic acids. In certain embodiments, the length of the sequence sharing identity is 41 or more contiguous amino acids or nucleic acids, e.g., 42, 43, 44, 45, 45, 47, 48, 49, 50, etc., contiguous amino acids or nucleic acids. In certain embodiments, the length of the sequence sharing identity is 50 or more contiguous amino acids or nucleic acids, e.g., 50-55, 55-60, 60-65, 65-70, 70-75, 75-80, 80-85, 85-90, 90-95, 95-100, 100-150, 150-200, 200-250, 250-300, 300-500, 500-1,000, etc. contiguous amino acids or nucleic acids.

[0119] As set-forth herein, modified nucleic acids encoding C1 inhibitor can be distinct from or exhibit 100% identity or less than 100% identity to a reference nucleic acid encoding C1 inhibitor.

[0120] According to certain embodiments, a nucleic acid encoding a C1 inhibitor is selected from the group consisting of: (1) a polynucleotide having at least 83% sequence identity to the sequence of SEQ ID NO: 105, such as 83% or greater sequence identity, 84% or greater sequence identity, 85% or greater sequence identity, 86% or greater sequence identity, 87% or greater sequence identity, 88% or greater sequence identity, 89% or greater sequence identity, 90% or greater sequence identity, 91% or greater sequence identity, 92% or greater sequence identity, 93% or greater sequence identity, 94% or greater sequence identity, 95% or greater sequence identity, 96% or greater sequence identity, 97% or greater sequence identity, 98% or greater sequence identity, 99% or greater sequence identity, 99.5% or greater sequence identity to the sequence of SEQ ID NO: 105; (2) a polynucleotide having at least 83% sequence identity to the sequence of SEQ ID NO: 106, such as 83% or greater sequence identity, 84% or greater sequence identity, 85% or greater sequence identity, 86% or greater sequence identity, 87% or greater sequence identity, 88% or greater sequence identity, 89% or greater sequence identity, 90% or greater sequence identity, 91% or greater sequence identity, 92% or greater sequence identity, 93% or greater sequence identity, 94% or greater sequence identity, 95% or greater sequence identity, 96% or greater sequence identity, 97% or greater sequence identity, 98% or greater sequence identity, 99% or greater sequence identity, 99.5% or greater sequence identity to the sequence of SEQ ID NO: 106; (3) a polynucleotide having at least 80% sequence identity to the sequence of SEQ ID NO: 107, such as 80% or greater sequence identity, 81% or greater sequence identity, 82% or greater sequence identity, 83% or greater sequence identity, 84% or greater sequence identity, 85% or greater sequence identity, 86% or greater sequence identity, 87% or greater sequence identity, 88% or greater sequence identity, 89% or greater sequence identity, 90% or greater sequence identity, 91% or greater sequence identity, 92% or greater sequence identity, 93% or greater sequence identity, 94% or greater sequence identity, 95% or greater sequence identity, 96% or greater sequence identity, 97% or greater sequence identity, 98% or greater sequence identity, 99% or greater sequence identity, 99.5% or greater sequence identity to the sequence of SEQ ID NO: 107; (4) a polynucleotide having at least 80% sequence identity to the sequence of SEQ ID NO: 108, such as 80% or greater sequence identity, 81% or greater sequence identity, 82% or greater sequence identity, 83% or greater sequence identity, 84% or greater sequence identity, 85% or greater sequence identity, 86% or greater sequence identity, 87% or greater sequence identity, 88% or greater sequence identity, 89% or greater sequence identity, 90% or greater sequence identity, 91% or greater sequence identity, 92% or greater sequence identity, 93% or greater sequence identity, 94% or greater sequence identity, 95% or greater sequence identity, 96% or greater sequence identity, 97% or greater sequence identity, 98% or greater sequence identity, 99% or greater sequence identity, 99.5% or greater sequence identity to the sequence of SEQ ID NO: 108; (5) a polynucleotide having at least 83% sequence identity to the sequence of SEQ ID NO: 109, such as 83% or greater sequence identity, 84% or greater sequence identity, 85% or greater sequence identity, 86% or greater sequence identity, 87% or greater sequence identity, 88% or greater sequence identity, 89% or greater sequence identity, 90% or greater sequence identity, 91% or greater sequence identity, 92% or greater sequence identity, 93% or greater sequence identity, 94% or greater sequence identity, 95% or greater sequence identity, 96% or greater sequence identity, 97% or greater sequence identity, 98% or greater sequence identity, 99% or greater sequence identity, 99.5% or greater sequence identity to the sequence of SEQ ID NO: 109; (6) a polynucleotide having at least 84% sequence identity to the sequence of SEQ ID NO: 110, such as 84% or greater sequence identity, 85% or greater sequence identity, 86% or greater sequence identity, 87% or greater sequence identity, 88% or greater sequence identity, 89% or greater sequence identity, 90% or greater sequence identity, 91% or greater sequence identity, 92% or greater sequence identity, 93% or greater sequence identity, 94% or greater sequence identity, 95% or greater sequence identity, 96% or greater sequence identity, 97% or greater sequence identity, 98% or greater sequence identity, 99% or greater sequence identity, 99.5% or greater sequence identity to the sequence of SEQ ID NO: 110; (7) a polynucleotide having at least 80% sequence identity to the sequence of SEQ ID NO: 111, such as 80% or greater sequence identity, 81% or greater sequence identity, 82% or greater sequence identity, 83% or greater sequence identity, 84% or greater sequence identity, 85% or greater sequence identity, 86% or greater sequence identity, 87% or greater sequence identity, 88% or greater sequence identity, 89% or greater sequence identity, 90% or greater sequence identity, 91% or greater sequence identity, 92% or greater sequence identity, 93% or greater sequence identity, 94% or greater sequence identity, 95% or greater sequence identity, 96% or greater sequence identity, 97% or greater sequence identity, 98% or greater sequence identity, 99% or greater sequence identity, 99.5% or greater sequence identity to the sequence of SEQ ID NO: 111; (8) a polynucleotide having at least 83% sequence identity to the sequence of SEQ ID NO: 112, such as 83% or greater sequence identity, 84% or greater sequence identity, 85% or greater sequence identity, 86% or greater sequence identity, 87% or greater sequence identity, 88% or greater sequence identity, 89% or greater sequence identity, 90% or greater sequence identity, 91% or greater sequence identity, 92% or greater sequence identity, 93% or greater sequence identity, 94% or greater sequence identity, 95% or greater sequence identity, 96% or greater sequence identity, 97% or greater sequence identity, 98% or greater sequence identity, 99% or greater sequence identity, 99.5% or greater sequence identity to the sequence of SEQ ID NO: 112; (9) a polynucleotide having at least 82% sequence identity to the sequence of SEQ ID NO: 113, such as 82% or greater sequence identity, 83% or greater sequence identity, 84% or greater sequence identity, 85% or greater sequence identity, 86% or greater sequence identity, 87% or greater sequence identity, 88% or greater sequence identity, 89% or greater sequence identity, 90% or greater sequence identity, 91% or greater sequence identity, 92% or greater sequence identity, 93% or greater sequence identity, 94% or greater sequence identity, 95% or greater sequence identity, 96% or greater sequence identity, 97% or greater sequence identity, 98% or greater sequence identity, 99% or greater sequence identity, 99.5% or greater sequence identity to the sequence of SEQ ID NO: 113; (10) a polynucleotide having at least 82% sequence identity to the sequence of SEQ ID NO: 114, such as 82% or greater sequence identity, 83% or greater sequence identity, 84% or greater sequence identity, 85% or greater sequence identity, 86% or greater sequence identity, 87% or greater sequence identity, 88% or greater sequence identity, 89% or greater sequence identity, 90% or greater sequence identity, 91% or greater sequence identity, 92% or greater sequence identity, 93% or greater sequence identity, 94% or greater sequence identity, 95% or greater sequence identity, 96% or greater sequence identity, 97% or greater sequence identity, 98% or greater sequence identity, 99% or greater sequence identity, 99.5% or greater sequence identity to the sequence of SEQ ID NO: 114; (11) a polynucleotide having at least 82% sequence identity to the sequence of SEQ ID NO: 115, such as 82% or greater sequence identity, 83% or greater sequence identity, 84% or greater sequence identity, 85% or greater sequence identity, 86% or greater sequence identity, 87% or greater sequence identity, 88% or greater sequence identity, 89% or greater sequence identity, 90% or greater sequence identity, 91% or greater sequence identity, 92% or greater sequence identity, 93% or greater sequence identity, 94% or greater sequence identity, 95% or greater sequence identity, 96% or greater sequence identity, 97% or greater sequence identity, 98% or greater sequence identity, 99% or greater sequence identity, 99.5% or greater sequence identity to the sequence of SEQ ID NO: 115; (12) a polynucleotide having at least 80% sequence identity to the sequence of SEQ ID NO: 116, such as 80% or greater sequence identity, 81% or greater sequence identity, 82% or greater sequence identity, 83% or greater sequence identity, 84% or greater sequence identity, 85% or greater sequence identity, 86% or greater sequence identity, 87% or greater sequence identity, 88% or greater sequence identity, 89% or greater sequence identity, 90% or greater sequence identity, 91% or greater sequence identity, 92% or greater sequence identity, 93% or greater sequence identity, 94% or greater sequence identity, 95% or greater sequence identity, 96% or greater sequence identity, 97% or greater sequence identity, 98% or greater sequence identity, 99% or greater sequence identity, 99.5% or greater sequence identity to the sequence of SEQ ID NO: 116; (13) a polynucleotide having at least 80% sequence identity to the sequence of SEQ ID NO: 117, such as 80% or greater sequence identity, 81% or greater sequence identity, 82% or greater sequence identity, 83% or greater sequence identity, 84% or greater sequence identity, 85% or greater sequence identity, 86% or greater sequence identity, 87% or greater sequence identity, 88% or greater sequence identity, 89% or greater sequence identity, 90% or greater sequence identity, 91% or greater sequence identity, 92% or greater sequence identity, 93% or greater sequence identity, 94% or greater sequence identity, 95% or greater sequence identity, 96% or greater sequence identity, 97% or greater sequence identity, 98% or greater sequence identity, 99% or greater sequence identity, 99.5% or greater sequence identity to the sequence of SEQ ID NO: 117; (14) a polynucleotide having at least 83% sequence identity to the sequence of SEQ ID NO: 118, such as 83% or greater sequence identity, 84% or greater sequence identity, 85% or greater sequence identity, 86% or greater sequence identity, 87% or greater sequence identity, 88% or greater sequence identity, 89% or greater sequence identity, 90% or greater sequence identity, 91% or greater sequence identity, 92% or greater sequence identity, 93% or greater sequence identity, 94% or greater sequence identity, 95% or greater sequence identity, 96% or greater sequence identity, 97% or greater sequence identity, 98% or greater sequence identity, 99% or greater sequence identity, 99.5% or greater sequence identity to the sequence of SEQ ID NO: 118; (15) a polynucleotide having at least 80% sequence identity to the sequence of SEQ ID NO: 119, such as 80% or greater sequence identity, 81% or greater sequence identity, 82% or greater sequence identity, 83% or greater sequence identity, 84% or greater sequence identity, 85% or greater sequence identity, 86% or greater sequence identity, 87% or greater sequence identity, 88% or greater sequence identity, 89% or greater sequence identity, 90% or greater sequence identity, 91% or greater sequence identity, 92% or greater sequence identity, 93% or greater sequence identity, 94% or greater sequence identity, 95% or greater sequence identity, 96% or greater sequence identity, 97% or greater sequence identity, 98% or greater sequence identity, 99% or greater sequence identity, 99.5% or greater sequence identity to the sequence of SEQ ID NO: 119; (16) a polynucleotide having at least 80% sequence identity to the sequence of SEQ ID NO: 120, such as 80% or greater sequence identity, 81% or greater sequence identity, 82% or greater sequence identity, 83% or greater sequence identity, 84% or greater sequence identity, 85% or greater sequence identity, 86% or greater sequence identity, 87% or greater sequence identity, 88% or greater sequence identity, 89% or greater sequence identity, 90% or greater sequence identity, 91% or greater sequence identity, 92% or greater sequence identity, 93% or greater sequence identity, 94% or greater sequence identity, 95% or greater sequence identity, 96% or greater sequence identity, 97% or greater sequence identity, 98% or greater sequence identity, 99% or greater sequence identity, 99.5% or greater sequence identity to the sequence of SEQ ID NO: 120; (17) a polynucleotide having at least 80% sequence identity to the sequence of SEQ ID NO: 121, such as 80% or greater sequence identity, 81% or greater sequence identity, 82% or greater sequence identity, 83% or greater sequence identity, 84% or greater sequence identity, 85% or greater sequence identity, 86% or greater sequence identity, 87% or greater sequence identity, 88% or greater sequence identity, 89% or greater sequence identity, 90% or greater sequence identity, 91% or greater sequence identity, 92% or greater sequence identity, 93% or greater sequence identity, 94% or greater sequence identity, 95% or greater sequence identity, 96% or greater sequence identity, 97% or greater sequence identity, 98% or greater sequence identity, 99% or greater sequence identity, 99.5% or greater sequence identity to the sequence of SEQ ID NO: 121; (18) a polynucleotide having at least 83% sequence identity to the sequence of SEQ ID NO: 122, such as 83% or greater sequence identity, 84% or greater sequence identity, 85% or greater sequence identity, 86% or greater sequence identity, 87% or greater sequence identity, 88% or greater sequence identity, 89% or greater sequence identity, 90% or greater sequence identity, 91% or greater sequence identity, 92% or greater sequence identity, 93% or greater sequence identity, 94% or greater sequence identity, 95% or greater sequence identity, 96% or greater sequence identity, 97% or greater sequence identity, 98% or greater sequence identity, 99% or greater sequence identity, 99.5% or greater sequence identity to the sequence of SEQ ID NO: 122; (19) a polynucleotide having 93% or greater sequence identity, 94% or greater sequence identity, 95% or greater sequence identity, 96% or greater sequence identity, 97% or greater sequence identity, 98% or greater sequence identity, 99% or greater sequence identity, 99.5% or greater sequence identity to the sequence of SEQ ID NO: 123; (20) a polynucleotide having 92% or greater sequence identity, 93% or greater sequence identity, 94% or greater sequence identity, 95% or greater sequence identity, 96% or greater sequence identity, 97% or greater sequence identity, 98% or greater sequence identity, 99% or greater sequence identity, 99.5% or greater sequence identity to the sequence of SEQ ID NO: 124; (21) a polynucleotide having at least 89% sequence identity to the sequence of SEQ ID NO: 125, such as 89% or greater sequence identity, 90% or greater sequence identity, 91% or greater sequence identity, 92% or greater sequence identity, 93% or greater sequence identity, 94% or greater sequence identity, 95% or greater sequence identity, 96% or greater sequence identity, 97% or greater sequence identity, 98% or greater sequence identity, 99% or greater sequence identity, 99.5% or greater sequence identity to the sequence of SEQ ID NO: 125; (22) a polynucleotide having at least 86% sequence identity to the sequence of SEQ ID NO: 126, such as 86% or greater sequence identity, 87% or greater sequence identity, 88% or greater sequence identity, 89% or greater sequence identity, 90% or greater sequence identity, 91% or greater sequence identity, 92% or greater sequence identity, 93% or greater sequence identity, 94% or greater sequence identity, 95% or greater sequence identity, 96% or greater sequence identity, 97% or greater sequence identity, 98% or greater sequence identity, 99% or greater sequence identity, 99.5% or greater sequence identity to the sequence of SEQ ID NO: 126; (23) a polynucleotide having 92% or greater sequence identity, 93% or greater sequence identity, 94% or greater sequence identity, 95% or greater sequence identity, 96% or greater sequence identity, 97% or greater sequence identity, 98% or greater sequence identity, 99% or greater sequence identity, 99.5% or greater sequence identity to the sequence of SEQ ID NO: 127; (24) a polynucleotide having at least 89% sequence identity to the sequence of SEQ ID NO: 128, such as 89% or greater sequence identity, 90% or greater sequence identity, 91% or greater sequence identity, 92% or greater sequence identity, 93% or greater sequence identity, 94% or greater sequence identity, 95% or greater sequence identity, 96% or greater sequence identity, 97% or greater sequence identity, 98% or greater sequence identity, 99% or greater sequence identity, 99.5% or greater sequence identity to the sequence of SEQ ID NO: 128; (25) a polynucleotide having at least 89% sequence identity to the sequence of SEQ ID NO: 129, such as 89% or greater sequence identity, 90% or greater sequence identity, 91% or greater sequence identity, 92% or greater sequence identity, 93% or greater sequence identity, 94% or greater sequence identity, 95% or greater sequence identity, 96% or greater sequence identity, 97% or greater sequence identity, 98% or greater sequence identity, 99% or greater sequence identity, 99.5% or greater sequence identity to the sequence of SEQ ID NO: 129; (26) a polynucleotide having at least 910% sequence identity to the sequence of SEQ ID NO: 130, such as 91% or greater sequence identity, 92% or greater sequence identity, 93% or greater sequence identity, 94% or greater sequence identity, 95% or greater sequence identity, 96% or greater sequence identity, 97% or greater sequence identity, 98% or greater sequence identity, 99% or greater sequence identity, 99.5% or greater sequence identity to the sequence of SEQ ID NO: 130; (27) a polynucleotide having at least 92% sequence identity to the sequence of SEQ ID NO: 131, such as 92% or greater sequence identity, 93% or greater sequence identity, 94% or greater sequence identity, 95% or greater sequence identity, 96% or greater sequence identity, 97% or greater sequence identity, 98% or greater sequence identity, 99% or greater sequence identity, 99.5% or greater sequence identity to the sequence of SEQ ID NO: 131; (28) a polynucleotide having at least 93% sequence identity to the sequence of SEQ ID NO: 132, such as 93% or greater sequence identity, 94% or greater sequence identity, 95% or greater sequence identity, 96% or greater sequence identity, 97% or greater sequence identity, 98% or greater sequence identity, 99% or greater sequence identity, 99.5% or greater sequence identity to the sequence of SEQ ID NO: 132; (29) a polynucleotide having at least 93% sequence identity to the sequence of SEQ ID NO: 133, such as 93% or greater sequence identity, 94% or greater sequence identity, 95% or greater sequence identity, 96% or greater sequence identity, 97% or greater sequence identity, 98% or greater sequence identity, 99% or greater sequence identity, 99.5% or greater sequence identity to the sequence of SEQ ID NO: 133; (30) a polynucleotide having at least 87% sequence identity to the sequence of SEQ ID NO: 134, such as 87% or greater sequence identity, 88% or greater sequence identity, 89% or greater sequence identity, 90% or greater sequence identity, 91% or greater sequence identity, 92% or greater sequence identity, 93% or greater sequence identity, 94% or greater sequence identity, 95% or greater sequence identity, 96% or greater sequence identity, 97% or greater sequence identity, 98% or greater sequence identity, 99% or greater sequence identity, 99.5% or greater sequence identity to the sequence of SEQ ID NO: 134; (31) a polynucleotide having at least 89% sequence identity to the sequence of SEQ ID NO: 135, such as 89% or greater sequence identity, 90% or greater sequence identity, 91% or greater sequence identity, 92% or greater sequence identity, 93% or greater sequence identity, 94% or greater sequence identity, 95% or greater sequence identity, 96% or greater sequence identity, 97% or greater sequence identity, 98% or greater sequence identity, 99% or greater sequence identity, 99.5% or greater sequence identity to the sequence of SEQ ID NO: 135; (32) a polynucleotide having at least 93% sequence identity to the sequence of SEQ ID NO: 136, such as 93% or greater sequence identity, 94% or greater sequence identity, 95% or greater sequence identity, 96% or greater sequence identity, 97% or greater sequence identity, 98% or greater sequence identity, 99% or greater sequence identity, 99.5% or greater sequence identity to the sequence of SEQ ID NO: 136; (33) a polynucleotide having at least 93% sequence identity to the sequence of SEQ ID NO: 137, such as 93% or greater sequence identity, 94% or greater sequence identity, 95% or greater sequence identity, 96% or greater sequence identity, 97% or greater sequence identity, 98% or greater sequence identity, 99% or greater sequence identity, 99.5% or greater sequence identity to the sequence of SEQ ID NO: 137; (34) a polynucleotide having at least 87% sequence identity to the sequence of SEQ ID NO: 138, such as 87% or greater sequence identity, 88% or greater sequence identity, 89% or greater sequence identity, 90% or greater sequence identity, 91% or greater sequence identity, 92% or greater sequence identity, 93% or greater sequence identity, 94% or greater sequence identity, 95% or greater sequence identity, 96% or greater sequence identity, 97% or greater sequence identity, 98% or greater sequence identity, 99% or greater sequence identity, 99.5% or greater sequence identity to the sequence of SEQ ID NO: 138; (35) a polynucleotide having at least 86% sequence identity to the sequence of SEQ ID NO: 139, such as 86% or greater sequence identity, 87% or greater sequence identity, 88% or greater sequence identity, 89% or greater sequence identity, 90% or greater sequence identity, 91% or greater sequence identity, 92% or greater sequence identity, 93% or greater sequence identity, 94% or greater sequence identity, 95% or greater sequence identity, 96% or greater sequence identity, 97% or greater sequence identity, 98% or greater sequence identity, 99% or greater sequence identity, 99.5% or greater sequence identity to the sequence of SEQ ID NO: 139; (36) a polynucleotide having at least 86% sequence identity to the sequence of SEQ ID NO: 140, such as 86% or greater sequence identity, 87% or greater sequence identity, 88% or greater sequence identity, 89% or greater sequence identity, 90% or greater sequence identity, 91% or greater sequence identity, 92% or greater sequence identity, 93% or greater sequence identity, 94% or greater sequence identity, 95% or greater sequence identity, 96% or greater sequence identity, 97% or greater sequence identity, 98% or greater sequence identity, 99% or greater sequence identity, 99.5% or greater sequence identity to the sequence of SEQ ID NO: 140; and (37) a polynucleotide having at least 86% sequence identity to the sequence of SEQ ID NO: 141, such as 86% or greater sequence identity, 87% or greater sequence identity, 88% or greater sequence identity, 89% or greater sequence identity, 90% or greater sequence identity, 91% or greater sequence identity, 92% or greater sequence identity, 93% or greater sequence identity, 94% or greater sequence identity, 95% or greater sequence identity, 96% or greater sequence identity, 97% or greater sequence identity, 98% or greater sequence identity, 99% or greater sequence identity, 99.5% or greater sequence identity to the sequence of SEQ ID NO: 141.

[0121] According to certain embodiments, a nucleic acid of the instant invention encodes a C1 inhibitor having the amino acid sequence of SEQ ID NO: 181 or 192.

[0122] According to certain embodiments, the polynucleotide comprises a nucleic acid that encodes a variant C1 inhibitor. Examples of the variant C1 inhibitor include, but are not limited to, a truncated C1 inhibitor, a fusion of two or more C1 inhibitors, or a fusion of a C1 inhibitor with a stabilizing moiety, such as an Fc region or domain.

[0123] As used herein, the term “Fc region” or “Fc domain” means the carboxyl-terminal portion of an immunoglobulin heavy chain constant region, or an analog or portion thereof. That is, e.g., an immunoglobulin Fc region of Ig, preferably IgG, which can comprise at least a portion of a hinge region, a CH2 domain, and a CH3 domain. The Fc region can be a native sequence Fc region or a variant Fc region. A native sequence Fc region comprises an amino acid sequence identical to the amino acid sequence of an Fc region found in nature. A variant Fc region as appreciated by one of ordinary skill in the art comprises an amino acid sequence which differs from that of a native sequence Fc region by virtue of at least one amino acid modification. According to certain embodiments, an Fc region is one of those described in Dall'Acqua et al., J Biol Chem., 281(33): 23514-24 (2006), Ishino et al., J Biol Chem., 288(23): 16529-37 (2013), Ying et al., J Biol Chem., 287(23): 19399-19408 (2012), or Zalevsky et al., Nat Biotechnol., 28(2): 157-159 (2010), incorporated herein by reference in their entirety.

[0124] According to certain embodiments, an Fc region of the instant invention has an amino acid sequence of any one of SEQ ID NOs: 219-224. According to certain embodiments, a nucleic acid encoding an Fc region of the instant invention has a sequence of any one of SEQ ID NOs: 159-164.

[0125] In certain embodiments, a nucleic acid encoding a variant C1 inhibitor has a sequence of any one of SEQ ID NOs: 143-144, 158, and 165-170.

[0126] According to certain embodiments, a nucleic acid of the instant invention encodes a variant C1 inhibitor having the amino acid sequence of any one of SEQ ID NOs: 193-201.

[0127] According to certain embodiments, the polynucleotide comprises a nucleic acid that encodes a fusion of two or more C1 inhibitor proteins. In certain embodiments, first C1 inhibitor protein or variant thereof is fused to a second C1 inhibitor protein or variant thereof via an autoprotease peptide, such as the peptide sequence of porcine teschovirus-1 2A (P2A). In certain embodiments, the nucleic acid has a sequence of SEQ ID NO: 158. According to certain embodiments, the polynucleotide comprises a nucleic acid that encodes a fusion of a first and second C1 inhibitor protein having the amino acid sequence of SEQ ID NO: 195.

[0128] Modified nucleic acids encoding C1 inhibitor that exhibit different features or characteristics compared to a reference or parental nucleic acid include substitutions of nucleotides. For example, modified nucleic acids encoding C1 inhibitor include nucleic acids with a reduced number of CpG dinucleotides compared to a reference nucleic acid encoding C1 inhibitor, referred to as CpG-reduced nucleic acids.

[0129] As used herein, the phrase “CpG-reduced” or “CpG-depleted” refers to a nucleic acid sequence which is generated, either synthetically or by mutation of a nucleic acid sequence, such that one or more of the CpG dinucleotides are removed from the nucleic acid sequence. In certain embodiments, all CpG motifs are removed to provide what is termed herein as a modified CpG-free sequence. The CpG motifs are suitably reduced or eliminated not just in a coding sequence (e.g., a transgene), but also in the non-coding sequences, including, e.g., 5′ and 3′ untranslated regions (UTRs), promoter, enhancer, signal peptides, polyA, ITRs, introns, and any other sequences present in the polynucleotide molecule.

[0130] According to certain embodiments, a nucleic acid encoding a C1 inhibitor contains less than 24 CpG dinucleotides, such as 24, 23, 22, 21, 20, 19, 18, 17, 16, 15, 14, 13, 12, 11, 10, 9, 8, 7, 6, 5, 4, 3, 2, 1, or 0 CpG dinucleotides.

[0131] The phrase “consisting essentially of” when referring to a particular nucleotide sequence or amino acid sequence means a sequence having the properties of a given SEQ ID NO. For example, when used in reference to an amino acid sequence, the phrase includes the sequence per se and molecular modifications that would not affect the basic and novel characteristics of the sequence.

[0132] Nucleic acids, expression vectors, AAV vector genomes, non-viral vectors, plasmids, including modified nucleic acids encoding C1 inhibitor of the instant invention can be prepared by using recombinant DNA technology methods. The availability of nucleotide sequence information enables preparation of isolated nucleic acid molecules of the instant invention by a variety of means. Nucleic acids encoding C1 inhibitor can be made using various standard cloning, recombinant DNA technology, via cell expression or in vitro translation and chemical synthesis techniques. Purity of polynucleotides can be determined through sequencing, gel electrophoresis and the like. For example, nucleic acids can be isolated using hybridization or computer-based database screening techniques. Such techniques include, but are not limited to: (1) hybridization of genomic DNA or cDNA libraries with probes to detect homologous nucleotide sequences; (2) antibody screening to detect polypeptides having shared structural features, for example, using an expression library; (3) polymerase chain reaction (PCR) on genomic DNA or cDNA using primers capable of annealing to a nucleic acid sequence of interest; (4) computer searches of sequence databases for related sequences; and (5) differential screening of a subtracted nucleic acid library.

[0133] Nucleic acids can be maintained as DNA in any convenient cloning vector. In certain embodiments, clones are maintained in a plasmid cloning/expression vector, such as pBluescript (Stratagene, La Jolla, CA), which is propagated in a suitable E. coli host cell. Alternatively, nucleic acids can be maintained in vector suitable for expression in mammalian cells, for example, an AAV vector. In cases where post-translational modification affects protein function, nucleic acid molecule can be expressed in mammalian cells.

### Expression Cassettes

[0134] The instant invention also provides expression cassettes comprising the polynucleotides comprising the nucleic acids encoding C1 inhibitor as described herein, operably linked to an expression control element.

[0135] In certain embodiments, the expression cassette comprises a polynucleotide comprising a nucleic acid encoding a C1 inhibitor, wherein the nucleic acid is selected from the group consisting of: (1) a polynucleotide having at least 83% sequence identity (e.g., 83-100% identity) to the sequence of SEQ ID NO: 105; (2) a polynucleotide having at least 83% sequence identity (e.g., 83-100% identity) to the sequence of SEQ ID NO: 106; (3) a polynucleotide having at least 80% sequence identity (e.g., 80-100% identity) to the sequence of SEQ ID NO: 107; (4) a polynucleotide having at least 80% sequence identity (e.g., 80-100% identity) to the sequence of SEQ ID NO: 108; (5) a polynucleotide having at least 83% sequence identity (e.g., 83-100% identity) to the sequence of SEQ ID NO: 109; (6) a polynucleotide having at least 84% sequence identity (e.g., 84-100% identity) to the sequence of SEQ ID NO: 110; (7) a polynucleotide having at least 80% sequence identity (e.g., 80-100% identity) to the sequence of SEQ ID NO: 111; (8) a polynucleotide having at least 83% sequence identity (e.g., 83-100% identity) to the sequence of SEQ ID NO: 112; (9) a polynucleotide having at least 82% sequence identity (e.g., 82-100% identity) to the sequence of SEQ ID NO: 113; (10) a polynucleotide having at least 82% sequence identity (e.g., 82-100% identity) to the sequence of SEQ ID NO: 114; (11) a polynucleotide having at least 82% sequence identity (e.g., 82-100% identity) to the sequence of SEQ ID NO: 115; (12) a polynucleotide having at least 80% sequence identity (e.g., 80-100% identity) to the sequence of SEQ ID NO: 116; (13) a polynucleotide having at least 80% sequence identity (e.g., 80-100% identity) to the sequence of SEQ ID NO: 117; (14) a polynucleotide having at least 83% sequence identity (e.g., 83-100% identity) to the sequence of SEQ ID NO: 118; (15) a polynucleotide having at least 80% sequence identity (e.g., 80-100% identity) to the sequence of SEQ ID NO: 119; (16) a polynucleotide having at least 80% sequence identity (e.g., 80-100% identity) to the sequence of SEQ ID NO: 120; (17) a polynucleotide having at least 80% sequence identity (e.g., 80-100% identity) to the sequence of SEQ ID NO: 121; (18) a polynucleotide having at least 83% sequence identity (e.g., 83-100% identity) to the sequence of SEQ ID NO: 122; (19) a polynucleotide having at least 93% sequence identity (e.g., 93-100% identity) to the sequence of SEQ ID NO: 123; (20) a polynucleotide having at least 92% sequence identity (e.g., 92-100% identity) to the sequence of SEQ ID NO: 124; (21) a polynucleotide having at least 89% sequence identity (e.g., 89-100% identity) to the sequence of SEQ ID NO: 125; (22) a polynucleotide having at least 86% sequence identity (e.g., 86-100% identity) to the sequence of SEQ ID NO: 126; (23) a polynucleotide having at least 92% sequence identity (e.g., 92-100% identity) to the sequence of SEQ ID NO: 127; (24) a polynucleotide having at least 89% sequence identity (e.g., 89-100% identity) to the sequence of SEQ ID NO: 128; (25) a polynucleotide having at least 89% sequence identity (e.g., 89-100% identity) to the sequence of SEQ ID NO: 129; (26) a polynucleotide having at least 91% sequence identity (e.g., 91-100% identity) to the sequence of SEQ ID NO: 130; (27) a polynucleotide having at least 92% sequence identity (e.g., 92-100% identity) to the sequence of SEQ ID NO: 131; (28) a polynucleotide having at least 93% sequence identity (e.g., 93-100% identity) to the sequence of SEQ ID NO: 132; (29) a polynucleotide having at least 93% sequence identity (e.g., 93-100% identity) to the sequence of SEQ ID NO: 133; (30) a polynucleotide having at least 87% sequence identity (e.g., 87-100% identity) to the sequence of SEQ ID NO: 134; (31) a polynucleotide having at least 89% sequence identity (e.g., 89-100% identity) to the sequence of SEQ ID NO: 135; (32) a polynucleotide having at least 93% sequence identity (e.g., 93-100% identity) to the sequence of SEQ ID NO: 136; (33) a polynucleotide having at least 93% sequence identity (e.g., 93-100% identity) to the sequence of SEQ ID NO: 137; (34) a polynucleotide having at least 87% sequence identity (e.g., 87-100% identity) to the sequence of SEQ ID NO: 138; (35) a polynucleotide having at least 86% sequence identity (e.g., 86-100% identity) to the sequence of SEQ ID NO: 139; (36) a polynucleotide having at least 86% sequence identity (e.g., 86-100% identity) to the sequence of SEQ ID NO: 140; and (37) a polynucleotide having at least 86% sequence identity (e.g., 86-100% identity) to the sequence of SEQ ID NO: 141.

[0136] In certain embodiments, the C1 inhibitor comprises the amino acid sequence of SEQ ID NO: 181 or 192.

[0137] According to certain embodiments, the expression cassette comprises a polynucleotide comprising a nucleic acid encoding a variant C1 inhibitor, wherein the variant C1 inhibitor comprises a truncated C1 inhibitor, a fusion of two or more C1 inhibitors, or a fusion of a C1 inhibitor with an Fc region or domain. According to certain embodiments, the nucleic acid has a sequence of any one of SEQ ID NOs: 143-144, 158, and 165-170.

[0138] According to certain embodiments, a nucleic acid of the instant invention encodes a variant C1 inhibitor having the amino acid sequence of any one of SEQ ID NOs: 193-201.

[0139] In certain embodiments, the expression cassette comprises a coding sequence for an appropriate secretory signal sequence or signal peptide that will allow the secretion of the polypeptide encoded by the polynucleotide molecule of the instant invention. As used herein, the term “secretory signal sequence” or “signal peptide” or variations thereof are intended to refer to amino acid sequences that can function to drive secretion of an operably linked polypeptide from the cell. In certain embodiments, a secretory signal sequence or signal peptide can function to enhance secretion of an operably linked polypeptide from the cell as compared with the level of secretion seen with the native polypeptide having its native or naturally occurring signal peptide. Signal peptides are short peptides (typically 25 to 30 amino acids in length) located in the N-terminus of proteins, carrying information for protein secretion. Signal peptides direct proteins to or through the endoplasmic reticulum secretory pathway. By “enhanced” secretion, it is meant that the relative proportion of the polypeptide synthesized by the cell that is secreted from the cell is increased; it is not necessary that the absolute amount of secreted protein is also increased. In certain embodiments, essentially all (i.e., at least 95%, 97%, 98%, 99% or more) of the polypeptide is secreted. It is not necessary, however, that essentially all or even most of the polypeptide is secreted, as long as the level of secretion is enhanced as compared with the native polypeptide having no signal peptide. Generally, secretory signal sequences are cleaved within the endoplasmic reticulum and, in certain embodiments, the secretory signal sequence is cleaved prior to secretion. It is not necessary, however, that the secretory signal sequence is cleaved as long as secretion of the polypeptide from the cell is enhanced and the polypeptide is functional. Thus, in certain embodiments, the secretory signal sequence is partially or entirely retained. The secretory signal sequence can be derived in whole or in part from the secretory signal of a secreted polypeptide (i.e., from the precursor) and/or can be in whole or in part synthetic. The length of the secretory signal sequence is not critical; generally, known secretory signal sequences are from about 10-15 to 50-60 amino acids in length. Further, known secretory signals from secreted polypeptides can be altered or modified (e.g., by substitution, deletion, truncation or insertion of amino acids) as long as the resulting secretory signal sequence functions to enhance secretion of an operably linked polypeptide. The secretory signal sequences of the instant invention can comprise, consist essentially of, or consist of a naturally occurring secretory signal sequence or a modification thereof. Numerous secreted proteins and sequences that direct secretion from the cell are known in the art, including those described in Owji et al., Eur. J Cell Biol. 97:422-441 (2018). The secretory signal sequence of the instant invention can further be in whole or in part synthetic or artificial. Synthetic or artificial secretory signal peptides are known in the art, see, e.g., Barash et al., Biochem. Biophys. Res. Comm. 294:835-42 (2002).

[0140] Any suitable signal peptide known to those skilled in the art in view of the present disclosure can be used in the instant invention. Examples of signal peptides include, but are not limited to, those found from the Signal Peptide Database (website: www.signalpeptide.de/). Examples of signal peptides suitable for the present invention include, but are not limited to, wild-type C1 inhibitor signal peptide, a human chymotrypsinogen B2 signal peptide (“Sp7”; 18 amino acid signal peptide of NCBI reference sequence NP_001020371), albumin (ALB) signal peptide, orosomucoid 1 (ORM1) signal peptide, transferrin (TF) signal peptide, al-microglobulin/bikunin precursor (AMBP) signal peptide, lysosome-associated membrane glycoprotein 1 (LAMP1) signal peptide, butyrophilin subfamily 2 member A2 (BTN2A2) signal peptide, CD300 signal peptide, Notch2 signal peptide, stereocilin (STRC) signal peptide, alpha 2-HS-glycoprotein (AHSG) signal peptide, SYN1 signal peptide (SEQ ID NO: 215), SYN2 signal peptide (SEQ ID NO: 216), SYN3 signal peptide (SEQ ID NO: 217), SYN4 signal peptide (SEQ ID NO: 218), secrecon (artificial signal sequence described in Barash et al., Biochem Biophys Res Commun., 294: 835-842 (2002)), mouse IgKVIII, human IgKVIII, CD33, tPA, a-1 antitrypsin signal peptide, native secreted alkaline phosphatase (SEAP). Any conventional signal sequence that directs proteins through the endoplasmic reticulum secretory pathway, including variants of the above-mentioned signal peptides, can be used in the present invention.

[0141] In certain embodiments, the instant invention relates to a signal peptide following any one, two, three, or all four of the following rules: (1) an amino-terminal N-region of 2-5 amino acids with a net positive charge, (2) a hydrophobic H-region of 6-15 amino acids, (3) a carboxyl-terminal C-region of 5-10 amino acids, with the amino acid in the −3 position from the C-terminus of the signal peptide having no charge, and the amino acid in the −1 position from the C-terminus of the signal peptide containing a short side chain, and (4) a leucine residue at the −10 position from the C-terminus of the signal peptide.

[0142] In certain embodiments, the instant invention relates to a signal peptide comprising a sequence with a sequence identity of at least 90%, at least 95%, or 100% to SEQ ID NO: 215. In certain embodiments, the instant invention relates to a signal peptide comprising a sequence with a sequence identity of at least 90%, at least 95% or 100% to SEQ ID NO: 216. In certain embodiments, the instant invention relates to a signal peptide comprising a sequence with a sequence identity of at least 90%, at least 95% or 100% to SEQ ID NO: 217. In certain embodiments, the instant invention relates to a signal peptide comprising a sequence with a sequence identity of at least 90%, at least 95% or 100% to SEQ ID NO: 218.

[0143] In certain embodiments, the instant invention relates to a nucleic acid encoding a signal peptide, wherein the nucleic acid comprises a sequence with a sequence identity of at least 90%, at least 95% or 100% to SEQ ID NO: 100. In certain embodiments, the instant invention relates to a nucleic acid encoding a signal peptide, wherein the nucleic acid comprises a sequence with a sequence identity of at least 90%, at least 95% or 100% to SEQ ID NO: 101. In certain embodiments, the instant invention relates to a nucleic acid encoding a signal peptide, wherein the nucleic acid comprises a sequence with a sequence identity of at least 90%, at least 95% or 100% to SEQ ID NO: 102. In certain embodiments, the instant invention relates to a nucleic acid encoding a signal peptide, wherein the nucleic acid comprises a sequence with a sequence identity of at least 90%, at least 95% or 100% to SEQ ID NO: 103. In further embodiments, the encoded signal peptide has a sequence identity of at least 95% or 100% to any one of SEQ ID NOs: 215-218.

[0144] In certain embodiments, signal peptides of the instant invention are useful for causing or driving secretion of any therapeutic protein expressed from any therapeutic transgene known in the art. In certain embodiments, signal peptides of the instant invention are useful for causing or driving secretion from the liver of any therapeutic protein expressed from any therapeutic transgene known in the art.

[0145] In certain embodiments, signal peptides comprising a sequence of one of SEQ ID NOs: 215-218 are useful for causing or driving secretion of any therapeutic protein expressed from any therapeutic transgene known in the art. In certain embodiments, signal peptides comprising a sequence of one of SEQ ID NOs: 215-218 are useful for causing or driving secretion of any therapeutic protein expressed from any therapeutic transgene known in the art.

[0146] Certain embodiments are directed to a polypeptide comprising a sequence at least 95%, or 100% identical to any one of SEQ ID NOs: 215, 216, 217, and 218; and a nucleic acid comprising a sequence encoding for a polypeptide comprising a sequence at least 95%, or 100% identical to any one of SEQ ID NOs: 215, 216, 217, and 218.

[0147] Examples of therapeutic transgenes include, but are not limited to, myelin oligodendrocyte glycoprotein (MOG), proteolipid protein 1 (PLP1), or myelin basic protein (MBP) for treatment of multiple sclerosis, such as, e.g., those disclosed in PCT/US2020/061356, filed Nov. 19, 2020, incorporated herein by reference in its entirety; GAA (acid alpha-glucosidase) for treatment of Pompe, such as, e.g., those disclosed in WO2019/222411, incorporated herein by reference in its entirety, disease or another glycogen storage disease; ATP7B (copper transporting ATPase2) for treatment of Wilson's disease; GLA (alpha galactosidase A) for treatment of Fabry disease; ASS1 (arginosuccinate synthase) for treatment of Citrullinemia Type 1; beta-glucocerebrosidase for treatment of Gaucher disease Type 1; beta-hexosaminidase A for treatment of Tay Sachs disease; SERPING1 (C1 protease inhibitor or C1 esterase inhibitor) for treatment of hereditary angioedema (HAE), also known as C1 inhibitor deficiency type I and type II); glucose-6-phosphatase for treatment of glycogen storage disease type I (GSDI); insulin, glucagon, growth hormone (GH), parathyroid hormone (PTH), growth hormone releasing factor (GRF), follicle stimulating hormone (FSH), luteinizing hormone (LH), human chorionic gonadotropin (hCG), vascular endothelial growth factor (VEGF), angiopoietins, angiostatin, granulocyte colony stimulating factor (GCSF), erythropoietin (EPO), connective tissue growth factor (CTGF), basic fibroblast growth factor (bFGF), acidic fibroblast growth factor (aFGF), epidermal growth factor (EGF), transforming growth factor α (TGFα), platelet-derived growth factor (PDGF), insulin growth factors I or II (IGF-I or IGF-II), TGFβ, activins, inhibins, bone morphogenic protein (BMP), nerve growth factor (NGF), brain-derived neurotrophic factor (BDNF), neurotrophins NT-3 or NT4/5, ciliary neurotrophic factor (CNTF), glial cell line derived neurotrophic factor (GDNF), neurturin, agrin, netrin-1 or netrin-2, hepatocyte growth factor (HGF), ephrins, noggin, sonic hedgehog or tyrosine hydroxylase; thrombopoietin (TPO), an interleukin (IL-1 through IL-36, etc.), monocyte chemoattractant protein, leukemia inhibitory factor, granulocyte-macrophage colony stimulating factor, Fas ligand, tumor necrosis factors α or β, interferons α, β, or γ, stem cell factor, flk-2/flt3 ligand, IgG, IgM, IgA, IgD or IgE, chimeric immunoglobulins, humanized antibodies, single chain antibodies, T cell receptors, chimeric T cell receptors, single chain T cell receptors, class I or class II MHC molecules; CFTR (cystic fibrosis transmembrane regulator protein), a blood coagulation (clotting) factor (Factor XIII, Factor IX (FIX), Factor VIII (FVIII), Factor X, Factor VII, Factor VIIa, protein C, etc.) a gain of function blood coagulation factor, an antibody, retinal pigment epithelium-specific 65 kDa protein (RPE65), erythropoietin, LDL receptor, lipoprotein lipase, ornithine transcarbamylase, β-globin, α-globin, spectrin, α-antitrypsin, adenosine deaminase (ADA), a metal transporter (ATP7A or ATP7), sulfamidase, an enzyme involved in lysosomal storage disease (ARSA), hypoxanthine guanine phosphoribosyl transferase, β-25 glucocerebrosidase, sphingomyelinase, lysosomal hexosaminidase, branched-chain keto acid dehydrogenase, a hormone, a growth factor, insulin-like growth factor 1 or 2, platelet derived growth factor, epidermal growth factor, nerve growth factor, neurotrophic factor-3 and -4, brain-derived neurotrophic factor, glial derived growth factor, transforming growth factor α and β, a cytokine, α-interferon, β-interferon, interferon-γ, interleukin-2, interleukin-4, interleukin 12, granulocyte-macrophage colony stimulating factor, lymphotoxin, a suicide gene product, herpes simplex virus thymidine kinase, cytosine deaminase, diphtheria toxin, cytochrome P450, deoxycytidine kinase, tumor necrosis factor, a drug resistance protein, a tumor suppressor protein (e.g., p53, Rb, Wt-1, NF1, Von Hippel-Lindau (VHL), adenomatous polyposis coli (APC)), a peptide with immunomodulatory properties, a tolerogenic or immunogenic peptide or protein Tregitope or hCDRT, insulin, glucokinase, guanylate cyclase 2D (LCA-GUCY2D), Rab escort protein 1 (Choroideremia), LCA 5 (LCA-Lebercilin), ornithine ketoacid aminotransferase (Gyrate Atrophy), Retinoschisin 1 (X-linked Retinoschisis), USH1C (Usher's Syndrome 1C), X-linked retinitis pigmentosa GTPase (XLRP), MERTK (AR forms of RP: retinitis pigmentosa), DFNB1 (Connexin 26 deafness), ACHM 2, 3 and 4 (Achromatopsia), PKD-1 or PKD-2 (Polycystic kidney disease), TPP1, CLN2, a sulfatase, N-acetylglucosamine-1-phosphate transferase, cathepsin A, GM2-AP, NPC1, VPC2, a sphingolipid activator protein; erythropoietin (EPO) for treatment of anemia; interferon-alpha, interferon-beta, and interferon-gamma for treatment of various immune disorders, viral infections and cancer; an interleukin (IL), including any one of IL-1 through IL-36, and corresponding receptors, for treatment of various inflammatory diseases or immuno-deficiencies; a chemokine, including chemokine (C-X-C motif) ligand 5 (CXCL5) for treatment of immune disorders; granulocyte-colony stimulating factor (G-CSF) for treatment of immune disorders such as Crohn's disease; granulocyte-macrophage colony stimulating factor (GM-CSF) for treatment of various human inflammatory diseases; macrophage colony stimulating factor (M-CSF) for treatment of various human inflammatory diseases; keratinocyte growth factor (KGF) for treatment of epithelial tissue damage; chemokines such as monocyte chemoattractant protein-1 (MCP-1) for treatment of recurrent miscarriage, HIV-related complications, and insulin resistance; tumor necrosis factor (TNF) and receptors for treatment of various immune disorders; alphal-antitrypsin for treatment of emphysema or chronic obstructive pulmonary disease (COPD); alpha-L-iduronidase for treatment of mucopolysaccharidosis I (MPS I); omithine transcarbamoylase (OTC) for treatment of OTC deficiency; phenylalanine hydroxylase (PAH) or phenylalanine ammonia-lyase (PAL) for treatment of phenylketonuria (PKU); lipoprotein lipase for treatment of lipoprotein lipase deficiency; apolipoproteins for treatment of apolipoprotein (Apo) A-I deficiency; low-density lipoprotein receptor (LDL-R) for treatment of familial hypercholesterolemia (FH); albumin for treatment of hypoalbuminemia; lecithin cholesterol acyltransferase (LCAT); carbamoyl synthetase I; argininosuccinate synthetase; argininosuccinate lyase; arginase; fumarylacetoacetate hydrolase; porphobilinogen deaminase; cystathionine beta-synthase for treatment of homocystinuria; branched chain ketoacid decarboxylase; isovaleryl-CoA dehydrogenase; propionyl CoA carboxylase; methylmalonyl-CoA mutase; glutaryl CoA dehydrogenase; insulin; pyruvate carboxylase; hepatic phosphorylase; phosphorylase kinase; glycine decarboxylase; H-protein; T-protein; cystic fibrosis transmembrane regulator (CFTR); ATP-binding cassette, sub-family A (ABC1), member 4 (ABCA4) for the treatment of Stargardt disease; dystrophin; a gene editing nuclease, e.g., a zinc finger nuclease (ZFN), a transcription activator-like effector nuclease (TALEN), a functional Type II CRISPR-Cas9.

[0148] In certain embodiments, the signal peptide is an endogenous or native C1 inhibitor signal peptide or a variant thereof.

[0149] In certain embodiments, the signal peptide is a heterologous signal peptide or a variant thereof.

[0150] In certain embodiments, the expression cassette comprises a nucleic acid encoding a signal peptide sequence positioned at the 5′ end of the nucleic acid encoding the C1 inhibitor.

[0151] In certain embodiments, the signal peptide has a sequence of any one of SEQ ID NOs: 84-103. In certain embodiments, the signal peptide has an amino acid sequence of any one of SEQ ID NOs: 203-224.

[0152] In certain embodiments, an expression control element is positioned 5′ of a nucleic acid encoding a C1 inhibitor.

[0153] The term “expression cassette”, as used herein, refers to a nucleic acid construct comprising nucleic acid elements sufficient for the expression of the polynucleotide molecule of the instant invention. Typically, an expression cassette comprises the polynucleotide molecule of the instant invention operably linked to a promoter sequence.

[0154] An “expression control element” refers to nucleic acid sequence(s) that influence expression of an operably linked nucleic acid. Expression control elements as set forth herein include promoters and enhancers. Vector sequences including AAV vectors and non-viral vectors can include one or more “expression control elements.” Typically, such elements are included to facilitate proper heterologous polynucleotide transcription and as appropriate translation (e.g., a promoter, enhancer, splicing signal for introns, maintenance of the correct reading frame of the gene to permit in-frame translation of mRNA and, stop codons etc.). Such elements typically act in cis, referred to as a “cis acting” element, but can also act in trans.

[0155] Expression control can be affected at the level of transcription, translation, splicing, message stability, etc. Typically, an expression control element that modulates transcription is juxtaposed near the 5′ end (i.e., “upstream”) of a transcribed nucleic acid. Expression control elements can also be located at the 3′ end (i.e., “downstream”) of the transcribed sequence or within the transcript (e.g., in an intron). Expression control elements can be located adjacent to or at a distance away from the transcribed sequence (e.g., 1-10, 10-25, 25-50, 50-100, 100-500, or more nucleotides from the polynucleotide), even at considerable distances. Nevertheless, owing to the length limitations of AAV vectors, expression control elements in AAV vectors will typically be within 1 to 1000 nucleotides from the transcription start site of the heterologous nucleic acid.

[0156] Functionally, expression of an operably linked nucleic acid is at least in part controllable by the element (e.g., promoter) such that the element modulates transcription of the nucleic acid and, as appropriate, translation of the transcript. A specific example of an expression control element is a promoter, which is usually located 5′ of the transcribed nucleic acid sequence. A promoter typically increases an amount expressed from operably linked nucleic acid as compared to an amount expressed when no promoter exists.

[0157] The term “operably linked” means that the regulatory sequences necessary for expression of a nucleic acid sequence are placed in the appropriate positions relative to the sequence so as to affect expression of the nucleic acid sequence. This same definition is sometimes applied to the arrangement of nucleic acid sequences and transcription control elements (e.g., promoters, enhancers, and termination elements) in an expression vector, e.g., recombinant AAV (rAAV) vector or non-viral vector. Encoding sequences can be operably linked to regulatory sequences in sense or antisense orientation. In certain embodiments, the promoter is a heterologous promoter.

[0158] The term “heterologous promoter”, as used herein, refers to a promoter that is not found to be operably linked to a given encoding sequence in nature. In certain embodiments, an expression cassette can comprise additional elements, for example, an intron, an enhancer, a polyadenylation site, a woodchuck response element (WRE), and/or other elements known to affect expression levels of the encoding sequence.

[0159] As used herein, the term “promoter” refers to a nucleotide sequence capable of controlling the expression of a coding sequence or functional RNA. In general, nucleic acid molecules of the instant invention are located 3′ of a promoter sequence. In certain embodiments, a promoter sequence consists of proximal and more distal upstream elements and can comprise an enhancer element.

[0160] An “enhancer” as used herein can refer to a sequence that is located adjacent to the heterologous nucleic acid. Enhancer elements are typically located upstream of a promoter element but also function and can be located downstream of or within a sequence. Hence, an enhancer element can be located 10-50 base pairs, 50-100 base pairs, 100-200 base pairs, or 200-300 base pairs, or more base pairs upstream or downstream of a heterologous nucleic acid sequence. Enhancer elements typically increase expression of an operably linked nucleic acid above expression afforded by a promoter element.

[0161] An expression construct can comprise regulatory elements which serve to drive expression in a particular cell or tissue type. Expression control elements (e.g., promoters) include those active in a particular tissue or cell type, referred to herein as a “tissue-specific expression control element/promoter.” Tissue-specific expression control elements are typically active in a specific cell or tissue type (e.g., liver). Expression control elements are typically active in particular cells, tissues, or organs because they are recognized by transcriptional activator proteins, or other regulators of transcription, that are unique to a specific cell, tissue or organ type. Such regulatory elements are known to those of skill in the art (see, e.g., Sambrook et al. (1989) and Ausubel et al. (1992)).

[0162] The incorporation of tissue specific regulatory elements in the expression constructs provides for at least partial tissue tropism for the expression of a heterologous nucleic acid encoding a protein or inhibitory RNA. Examples of promoters that are active in liver are the transthyretin (TTR) gene promoter; human alpha 1-antitrypsin (hAAT) promoter; the lipoprotein A-I promoter; albumin, Miyatake, et al., J Virol., 71:5124-32 (1997); hepatitis B virus core promoter, Sandig, et al., Gene Ther. 3: 1002-9 (1996); alpha-fetoprotein (AFP), Arbuthnot, et al., Hum. Gene. Ther., 7:1503-14 (1996); human Factor IX promoter; thyroxin binding globulin (TBG) promoter; TTR minimal enhancer/promoter, alpha-antitrypsin promoter, LSP (845 nt) (requires intronless scAAV); LSP1 promoter, among others. An example of an enhancer active in liver is apolipoprotein E (ApoE) hepatic control region 1 (HCR-1) and 2 (HCR-2) (Allan et al, J Biol. Chem., 272:29113-19 (1997)).

[0163] Expression control elements also include ubiquitous or promiscuous promoters/enhancers which are capable of driving expression of a polynucleotide in many different cell types. Such elements include, but are not limited to the cytomegalovirus (CMV) immediate early promoter/enhancer sequences, the Rous sarcoma virus (RSV) promoter/enhancer sequences and the other viral promoters/enhancers active in a variety of mammalian cell types, or synthetic elements that are not present in nature (see, e.g., Boshart et al., Cell, 41:521-530 (1985)), the SV40 promoter, the dihydrofolate reductase promoter, the cytoplasmic beta-actin promoter and the phosphoglycerate kinase (PGK) promoter.

[0164] Expression control elements also can confer expression in a manner that is regulatable, that is, a signal or stimuli increases or decreases expression of the operably linked heterologous polynucleotide. A regulatable element that increases expression of the operably linked polynucleotide in response to a signal or stimuli is also referred to as an “inducible element” (i.e., is induced by a signal). Particular examples include, but are not limited to, a hormone (e.g., steroid) inducible promoter. Typically, the amount of increase or decrease conferred by such elements is proportional to the amount of signal or stimuli present; the greater the amount of signal or stimuli, the greater the increase or decrease in expression. Particular non-limiting examples include zinc-inducible sheep metallothionine (MT) promoter; the steroid hormone-inducible mouse mammary tumor virus (MMTV) promoter; the T7 polymerase promoter system (WO 98/10088); the tetracycline-repressible system (Gossen, et al., Proc. Natl. Acad. Sci. USA, 89:5547-5551 (1992)); the tetracycline-inducible system (Gossen, et al., Science. 268: 1766-1769 (1995); see also Harvey, et al., Curr. Opin. Chem. Biol. 2:512-518 (1998)); the RU486-inducible system (Wang, et al., Nat. Biotech. 15:239-243 (1997) and Wang, et al., Gene Ther. 4:432-441 (1997); and the rapamycin-inducible system (Magari, et al., J. Clin. Invest. 100:2865-2872 (1997); Rivera, et al., Nat. Medicine. 2:1028-1032 (1996)). Other regulatable control elements which can be useful in this context are those which are regulated by a specific physiological state, e.g., temperature, acute phase, development.

[0165] Other examples of promoters include, but are not limited to, the phosphoglycerate kinase (PKG) promoter, CAG (composite of the CMV enhancer the chicken beta-actin promoter (CBA) and the rabbit beta globin intron) and other constitutive promoters, neuronal specific enolase (NSE) promoter, synapsin or NeuN promoters, the SV40 early promoter, mouse mammary tumor virus LTR promoter; adenovirus major late promoter (Ad MLP), a herpes simplex virus (HSV) promoter, spleen focus-forming virus (SFFV) promoter, rous sarcoma virus (RSV) promoter, rat insulin promoter, thyroxine binding globulin (TBG) promoter and other liver-specific promoters, the desmin promoter and similar muscle-specific promoters, the EF1-alpha promoter, synthetic promoters, hybrid promoters, promoters with multi-tissue specificity, and the like, all of which are promoters well known and readily available to those of skill in the art. Other promoters can be of human origin or from other species, including from mice.

[0166] Expression control elements also include the native elements(s) for the heterologous polynucleotide. A native control element (e.g., promoter) can be used when it is desired that expression of the heterologous polynucleotide should mimic the native expression. The native element can be used when expression of the heterologous polynucleotide is to be regulated temporally or developmentally, or in a tissue-specific manner, or in response to specific transcriptional stimuli. Other native expression control elements, such as introns, polyadenylation sites or Kozak consensus sequences can also be used.

[0167] In the example of an expression control element in operable linkage with a nucleic acid, the relationship is such that the control element modulates expression of the nucleic acid. More specifically, for example, two DNA sequences operably linked means that the two DNAs are arranged (cis or trans) in such a relationship that at least one of the DNA sequences is able to exert a physiological effect upon the other sequence.

[0168] Accordingly, additional elements for vectors include, without limitation, an expression control (e.g., promoter/enhancer) element, a transcription termination signal or stop codon, 5′ or 3′ untranslated regions (e.g., polyadenylation (poly A) sequences) which flank a sequence, such as one or more copies of an AAV ITR sequence, or an intron.

[0169] Further elements include, for example, filler or stuffer polynucleotide sequences, for example to improve packaging and reduce the presence of contaminating nucleic acid. AAV vectors typically accept inserts of DNA having a size range which is generally about 4 kb to about 5.2 kb, or slightly more. Thus, for shorter sequences, inclusion of a stuffer or filler in order to adjust the length to near or at the normal size of the virus genomic sequence acceptable for AAV vector packaging into virus particle. In certain embodiments, a filler/stuffer nucleic acid sequence is an untranslated (non-protein encoding) segment of nucleic acid. For a nucleic acid sequence less than 4.7 kb, the filler or stuffer polynucleotide sequence has a length that when combined (e.g., inserted into a vector) with the sequence has a total length between about 3.0-5.5 kb, or between about 4.0-5.0 kb, or between about 4.3-4.8 kb.

[0170] In certain embodiments, the expression cassette further comprises one or more tissue specificity elements. As used herein, a “tissue specificity element” refers to any polynucleotide sequence that directs tissue-specific expression of a transgene. In certain embodiments, the tissue specificity element is a promoter. In certain embodiments, the promoter sequence is CpG-reduced compared to the wild-type promoter sequence. In certain embodiments, the promoter is an hAAT promoter. In certain embodiments, the hAAT promoter sequence has a polynucleotide sequence of SEQ ID NO: 79 or 80.

[0171] In certain embodiments, the expression cassette further comprises one or more potency elements. As used herein, a “potency element” refers to any polynucleotide sequence that enhances the stability of an mRNA molecule. In certain embodiments, a potency element is an enhancer or a polyadenylation (polyA) sequence. In certain embodiments, the enhancer or polyA sequence is CpG-reduced compared to the wild-type enhancer or polyA sequence. The one or more potency elements can be positioned anywhere within the expression cassette. In certain embodiments, a potency element is an enhancer such as, for example, those described in Van Linthout et al., Hum Gene Ther. 2002 May 1; 13(7):829-40, Donello et al., J Virol. 1998; 72(6):5085-5092, Zufferey et al., J Virol. 1999; 73(4):2886-2892, or Choi et al., Mol Brain 7, 17 (2014), incorporated herein by reference in their entirety. In certain embodiments, a potency element is an enhancer selected from the group consisting of ApoE, 2×ApoE, 4×ApoE, hAAT enhancer, WPRE, WPRE3, and an intron that is optionally a human hemoglobin β (HBB)-derived intron, such as, for example, those described in Ronzitti et al., Mol Ther Methods Clin Dev. 2016; 3:160, incorporated herein by reference in its entirety. In certain embodiments, the enhancer has a polynucleotide sequence selected from the group consisting of SEQ ID NOs: 225, 74-76, 81-82, and 173-178. In certain embodiments, a potency element is a polyA sequence that is optionally a bovine growth hormone (bGH) polyadenylation (polyA) sequence. In certain embodiments, the polyA sequence has a polynucleotide of SEQ ID NO: 83.

[0172] In certain embodiments, the expression control element comprises an ApoE/hAAT enhancer/promoter sequence positioned 5′ of the nucleic acid encoding C1 inhibitor. In certain embodiments, the ApoE/hAAT enhancer/promoter sequence is CpG-reduced compared to wild-type ApoE/hAAT enhancer/promoter sequence. In certain embodiments, the ApoE enhancer sequence has a sequence of any one of SEQ ID NOs: 225 and 74-76. In certain embodiments, the hAAT promoter sequence has a sequence of SEQ ID NO: 79 or 80.

[0173] In certain embodiments, the expression cassette further comprises one or more response elements. As used herein, a “response element” refers to a nucleic acid sequence, which when positioned proximate to a promoter or within the promoter is capable of regulating the transcription activity. In certain embodiments, a response element is an miRNA binding site, a regulated Irel-dependent decay (RIDD) sequence, an acute phase response element (APRE), or a 5′ or 3′ UTR sequence. In certain embodiments, the an miRNA binding site, a regulated Irel-dependent decay (RIDD) sequence, an acute phase response element (APRE), or a 5′ or 3′ UTR sequence is CpG-reduced compared to the wild-type an miRNA binding site, a regulated Irel-dependent decay (RIDD) sequence, an acute phase response element (APRE), or a 5′ or 3′ UTR sequence. In certain embodiments, the response element is an miRNA binding site, optionally a miR-142-3p sequence, such as those described in Brown et al., Nat Med 12, 585-591 (2006). In certain embodiments, the miR-142-3p sequence has a polynucleotide sequence of SEQ ID NO: 179. In certain embodiments, the response element is a regulated Irel-dependent decay (RIDD) sequence. In certain embodiments, the response element is a RIDD sequence such as, for example, those described in Oikawa et al., Nucleic Acids Res. 2010 October; 38(18):6265-73 or Moore and Hollien, Molecular Biology of the Cell 2015 26:16, 2873-2884, incorporated herein by reference in their entirety. In certain embodiments, the response element is a RIDD sequence selected from the group consisting of 1×RIDD, 3×RIDD, and RIDD1×Blos. In certain embodiments, the RIDD sequence has a polynucleotide sequence selected from the group consisting of SEQ ID NOs: 185-187. In certain embodiments, the response element is an acute phase response element (APRE). In certain embodiments, the response element is an APRE sequence such as, for example, those described in Longley et al., J Immunol. 1999 Oct. 15; 163(8):4537-45, Podvinec et al., PNAS, 2004; 101(24):9127-9132, Prada et al., Immunobiology. 1998 August; 199(2):377-88, Rygg et al., Scand J Immunol. 2001 June; 53(6):588-95, or Serrano-Mendioroz et al., Hum Gene Ther. 2018; 29(4):480-491, incorporated herein by reference in their entirety. In certain embodiments, the response element is an APRE selected from the group consisting of SAA2 APRE, 2×ADRES, SERPING1 5′ UTR, APRE 5′ UTR, and SAA2 5′ UTR. In certain embodiments, the APRE has a polynucleotide sequence selected from the group consisting of SEQ ID NOs: 77-78, 180, and 182-183. In certain embodiments, the response element is a 5′ or 3′ UTR sequence, optionally a SAA2 3′ UTR sequence, such as, for example, those described in Longley et al., J Immunol. 1999 Oct. 15; 163(8):4537-45. In certain embodiments, the SAA2 3′ UTR sequence has a polynucleotide sequence of SEQ ID NO: 184.

[0174] In certain embodiments, the one or more tissue specificity elements, one or more potency elements, and/or one or more response elements are positioned 5′ of the nucleic acid.

[0175] In certain embodiments, the one or more tissue specificity elements, one or more potency elements, and/or one or more response elements are positioned 3′ of the nucleic acid.

[0176] In certain embodiments, the expression cassette has a sequence of any one of SEQ ID NOs: 1-69 and 227-229. In certain embodiments, the expression cassette has a sequence of at least 75% sequence identity, at least 80% sequence identity, at least 85% sequence identity, at least 90% sequence identity, at least 95% sequence identity, at least 96% sequence identity, at least 97% sequence identity, at least 98% sequence identity, at least 99% sequence identity, at least 99.5% sequence identity, or 100% sequence identity to any one of SEQ ID NOs: 1-69 and 227-229.

### Gene Transfer Systems

### Viral Vectors

[0177] The instant invention further provides viral vectors, such as adeno-associated virus (AAV) vectors comprising polynucleotides comprising the nucleic acids encoding C1 inhibitor as set forth herein.

[0178] The term “vector” or “gene transfer vector” as used herein, refers to a nucleic acid molecule comprising a gene of interest. Examples of vectors include, but are not limited to, viral vectors delivered by viral particles or virus-like particles (VLPs) that resemble viral particles but are non-infectious, such as retroviral, adenoviral, adeno-associated viral, and lentiviral particles or VLPs; and non-viral vectors delivered by non-viral gene transfer systems, such as microinjection, electroporation, liposomes, large natural polymers, large synthetic polymers, and polymers comprised of both natural and synthetic components.

[0179] A vector nucleic acid sequence generally contains at least an origin of replication for propagation in a cell and optionally additional elements, such as a heterologous polynucleotide sequence, expression control element (e.g., a promoter, enhancer), intron, an inverted terminal repeat (ITR), selectable marker (e.g., antibiotic resistance), polyadenylation signal.

[0180] As used herein, the term “gene transfer system” refers to any means of delivering a composition comprising a nucleic acid sequence to a cell or tissue. For example, a gene transfer system can be a viral gene transfer system, e.g., intact viruses, modified viruses and VLPs to facilitate delivery of a viral vector to a desired cell or tissue. A gene transfer system can also be a non-viral delivery system that does not comprise viral coat protein or form a viral particle or VLP, e.g., liposome-based systems, polymer-based systems, protein-based systems, metallic particle-based systems, peptide cage systems, etc.

[0181] A viral vector is derived from or based upon one or more nucleic acid elements that comprise a viral genome. Particular viral vectors include, but are not limited to, lentiviral and adeno-associated virus (AAV) vectors.

[0182] The term “recombinant,” as a modifier of vector, such as recombinant AAV (rAAV) vector, as well as a modifier of sequences such as recombinant polynucleotides and polypeptides, means that the compositions have been manipulated (i.e., engineered) in a fashion that generally does not occur in nature. Although the term “recombinant” is not always used herein in reference to AAV vectors, as well as sequences such as polynucleotides, recombinant forms including polynucleotides, are expressly included in spite of any such omission.

[0183] A “recombinant AAV vector” or “rAAV” is derived from the wild-type genome of AAV by using molecular methods to remove the wild-type genome from the AAV genome, and replacing with a non-native nucleic acid sequence, referred to as a heterologous nucleic acid. Typically, for AAV one or both inverted terminal repeat (ITR) sequences of AAV genome are retained in the AAV vector. rAAV is distinguished from an AAV genome, since all or a part of the AAV genome has been replaced with a non-native sequence with respect to the AAV genomic nucleic acid. Incorporation of a non-native sequence therefore defines the AAV vector as a “recombinant” vector, which can be referred to as a “rAAV vector.”

[0184] An rAAV sequence can be packaged, referred to herein as a “particle,” for subsequent infection (transduction) of a cell, ex vivo, in vitro or in vivo. Where a recombinant AAV vector sequence is encapsidated or packaged into an AAV particle, the particle can also be referred to as an “rAAV vector” or “rAAV particle.” Such rAAV particles include proteins that encapsidate or package the vector genome, and in the case of AAV, they are referred to as capsid proteins.

[0185] A vector “genome” refers to the portion of the recombinant plasmid sequence that is ultimately packaged or encapsidated to form a viral (e.g., rAAV) particle. In cases where recombinant plasmids are used to construct or manufacture recombinant vectors, the vector genome does not include the portion of the “plasmid” that does not correspond to the vector genome sequence of the recombinant plasmid. This non vector genome portion of the recombinant plasmid can be referred to as the “plasmid backbone,” which is important for cloning and amplification of the plasmid, a process that is needed for propagation and recombinant virus production, but is not itself packaged or encapsidated into virus (e.g., AAV) particles. Thus, a vector “genome” refers to the polynucleotide that is packaged or encapsidated by virus (e.g., AAV).

[0186] Host cells for producing recombinant AAV particles include but are not limited to microorganisms, yeast cells, insect cells, and mammalian cells that can be, or have been, used as recipients of a heterologous rAAV vectors. Cells from the stable human cell line, HEK293 (readily available through, e.g., the American Type Culture Collection under Accession Number ATCC CRL1573) can be used. In certain embodiments a modified human embryonic kidney cell line (e.g., HEK293), which is transformed with adenovirus type-5 DNA fragments and expresses the adenoviral E1a and E1b genes is used to generate recombinant AAV particles. The modified HEK293 cell line is readily transfected and provides a particularly convenient platform in which to produce rAAV particles. Other host cell lines appropriate for recombinant AAV production are described in International Application PCT/2017/024951, the disclosure of which is herein incorporated by reference in its entirety.

[0187] In certain embodiments, AAV helper functions are introduced into the host cell by transfecting the host cell with an AAV helper construct either prior to, or concurrently with, the transfection of an AAV expression vector. A host cell having AAV helper functions can be referred to as a “helper cell” or “packaging helper cell.” AAV helper constructs are thus sometimes used to provide at least transient expression of AAV rep and/or cap genes to complement missing AAV functions necessary for productive AAV transduction. AAV helper constructs often lack AAV ITRs and can neither replicate nor package themselves. These constructs can be in the form of a plasmid, phage, transposon, cosmid, virus, or virion. A number of AAV helper constructs have been described, such as the commonly used plasmids pAAV/Ad and pIM29+45 which encode both Rep and Cap expression products. A number of other vectors are known which encode Rep and/or Cap expression products.

[0188] Methods of generating rAAV particles capable of transducing mammalian cells are known in the art. For example, rAAV particles can be produced as described in U.S. Pat. No. 9,408,904; and International Applications PCT/US2017/025396 and PCT/US2016/064414, the disclosures of which are herein incorporated by reference in their entirety.

[0189] The instant invention provides cells comprising nucleic acids encoding C1 inhibitor, cells comprising expression cassettes comprising the polynucleotides comprising the nucleic acids encoding C1 inhibitor, cells comprising viral vectors such as AAV vectors comprising nucleic acids encoding C1 inhibitor, and cells comprising non-viral vectors comprising polynucleotides comprising the nucleic acids encoding C1 inhibitor. In certain embodiments, the cell produces a viral vector. In certain embodiments, the cell produces an AAV vector as set forth herein.

[0190] Also provided are methods of producing viral vectors such as AAV vectors as set forth herein. In certain embodiments, a method of producing AAV vectors includes: introducing an AAV vector genome comprising a polynucleotide comprising a nucleic acid encoding C1 inhibitor or expression cassette comprising a polynucleotide comprising a nucleic acid encoding C1 inhibitor as set forth herein into a packaging helper cell; and culturing the helper cell under conditions to produce the AAV vectors. In certain embodiments, a method of producing AAV vector includes: introducing a polynucleotide comprising a nucleic acid encoding C1 inhibitor or expression cassette comprising a polynucleotide comprising a nucleic acid encoding C1 inhibitor as set forth herein into a packaging helper cell; and culturing the helper cells under conditions to produce the AAV vector.

[0191] In certain embodiments, the cells are mammalian cells.

[0192] In certain embodiments, cells for vector production provide helper functions, such as AAV helper functions, that package the vector into a viral particle. In certain embodiments, the helper functions are Rep and/or Cap proteins for AAV vector packaging. In certain embodiments, cells for vector production can be stably or transiently transfected with polynucleotide(s) encoding Rep and/or Cap protein sequence(s). In certain embodiments, cells for vector production provide Rep78 and/or Rep68 proteins. In such cells, the cells can be stably or transiently transfected with Rep78 and/or Rep68 proteins polynucleotide encoding sequence(s).

[0193] In certain embodiments, cells for vector production are human embryonic kidney cells. In certain embodiments, cells for vector production are HEK-293 cells.

[0194] The term “transduce” and grammatical variations thereof refer to introduction of a molecule such as an rAAV vector into a cell or host organism. The heterologous nucleic acid/transgene may or may not be integrated into genomic nucleic acid of the recipient cell.

[0195] The introduced heterologous nucleic acid can also exist in the recipient cell or host organism extrachromosomally, or only transiently.

[0196] A “transduced cell” is a cell into which the transgene has been introduced. Accordingly, a “transduced” cell (e.g., in a mammal, such as a cell or tissue or organ cell), means a genetic change in a cell following incorporation, for example, of a nucleic acid (e.g., a transgene) into the cell. Thus, a “transduced” cell is a cell into which, or a progeny thereof in which an exogenous nucleic acid has been introduced. The cell(s) can be propagated, and the introduced protein expressed. For gene therapy uses and methods, a transduced cell can be in a subject.

[0197] The term “isolated,” when used as a modifier of a composition, means that the compositions are made by the hand of man or are separated, completely or at least in part, from their naturally occurring in vivo environment. Generally, isolated compositions are substantially free of one or more materials with which they normally associate with in nature, for example, one or more protein, nucleic acid, lipid, carbohydrate, cell membrane.

[0198] The term “isolated” does not exclude combinations produced by the hand of man, for example, a rAAV sequence, or rAAV particle that packages or encapsidates an AAV vector genome and a pharmaceutical formulation. The term “isolated” also does not exclude alternative physical forms of the composition, such as hybrids/chimeras, multimers/oligomers, modifications (e.g., phosphorylation, glycosylation, lipidation) or derivatized forms, or forms expressed in host cells produced by the hand of man.

[0199] The term “substantially pure” refers to a preparation comprising at least 50-60% by weight the compound of interest (e.g., nucleic acid, oligonucleotide, protein, etc.). The preparation can comprise at least 75% by weight, or at least 85% by weight, or about 90-99% by weight, of the compound of interest. Purity is measured by methods appropriate for the compound of interest (e.g., chromatographic methods, agarose or polyacrylamide gel electrophoresis, HPLC analysis, and the like).

[0200] Recombinant AAV vector, as well as methods and uses thereof, include any viral strain or serotype. As a non-limiting example, a recombinant AAV vector can be based upon any AAV genome, such as LK03, AAV1, AAV2, AAV3, AAV4, AAV5, AAV6, AAV7, AAV8, AAV9, AAV10, AAV11, AAV12, Rh10, Rh74, AAV3B or AAV-2i8, for example. Such vectors can be based on the same strain or serotype (or subgroup or variant) or be different from each other. As a non-limiting example, a recombinant AAV vector based upon a particular serotype genome can be identical to the serotype of the capsid proteins that package the vector. In addition, a recombinant AAV vector genome can be based upon an AAV serotype genome distinct from the serotype of the AAV capsid proteins that package the vector. For example, the AAV vector genome can be based upon AAV2, whereas at least one of the three capsid proteins could be an LK03, AAV1, AAV3, AAV4, AAV5, AAV6, AAV7, AAV8, AAV9, AAV10, AAV11, AAV12, Rh10, Rh74, AAV3B or AAV-2i8, or variant thereof.

[0201] In certain embodiments, adeno-associated virus (AAV) vectors include LK03, AAV1, AAV2, AAV3, AAV4, AAV5, AAV6, AAV7, AAV8, AAV9, AAV10, AAV11, AAV12, Rh10, Rh74, AAV3B and AAV-2i8, as well as variants (e.g., capsid variants, such as amino acid insertions, additions, substitutions and deletions) thereof, for example, as set forth in WO 2013/158879 (International Application PCT/US2013/037170; disclosing RHM4-1, RHM15-1, RHM15-2, RHM15-3/RHM15-5, RHM15-4 and RHM15-6), WO 2015/013313 (International Application PCT/US2014/047670), US 2013/0059732 (U.S. Pat. No. 9,169,299, discloses LK01, LK02, LK03, etc.), and WO 2016/210170, the disclosures of which are herein incorporated by reference in their entirety.

[0202] As used herein, the term “serotype” is a distinction used to refer to an AAV having a capsid that is serologically distinct from other AAV serotypes. Serologic distinctiveness is determined on the basis of the lack of cross-reactivity between antibodies to one AAV as compared to another AAV. Such cross-reactivity differences are usually due to differences in capsid protein sequences/antigenic determinants (e.g., due to VP1, VP2, and/or VP3 sequence differences of AAV serotypes). Despite the possibility that AAV variants including capsid variants might not be serologically distinct from a reference AAV or other AAV serotype, they differ by at least one nucleotide or amino acid residue compared to the reference or other AAV serotype.

[0203] Under the traditional definition, a serotype means that the virus of interest has been tested against serum specific for all existing and characterized serotypes for neutralizing activity and no antibodies have been found that neutralize the virus of interest. As more naturally occurring virus isolates are discovered and/or capsid mutants generated, there may or may not be serological differences with any of the currently existing serotypes. Thus, in cases where the new virus (e.g., AAV) has no serological difference, this new virus (e.g., AAV) would be a subgroup or variant of the corresponding serotype. In many cases, serology testing for neutralizing activity has yet to be performed on mutant viruses with capsid sequence modifications to determine if they are of another serotype according to the traditional definition of serotype. Accordingly, for the sake of convenience and to avoid repetition, the term “serotype” broadly refers to both serologically distinct viruses (e.g., AAV) as well as viruses (e.g., AAV) that are not serologically distinct that can be within a subgroup or a variant of a given serotype.

[0204] As set forth herein, AAV capsid proteins can exhibit less than 100% sequence identity to a reference or parental AAV serotype such as AAV1, AAV2, AAV3, AAV4, AAV5, AAV6, AAV7, AAV8, AAV9, AAV10, AAV11, AAV12, Rh10, Rh74 (SEQ ID NO: 188), AAV3B, LK03 (SEQ ID NO: 191), AAV-2i8, SEQ ID NO: 226, SEQ ID NO: 189, and/or SEQ ID NO: 190, but are distinct from and not identical to known AAV genes or proteins, such as AAV1, AAV2, AAV3, AAV4, AAV5, AAV6, AAV7, AAV8, AAV9, AAV10, AAV11, AAV12, Rh10, Rh74 (SEQ ID NO: 188), AAV3B, LK03 (SEQ ID NO: 191), AAV-2i8, SEQ ID NO: 226, SEQ ID NO: 189, and/or SEQ ID NO: 190. In certain embodiments, a modified/variant AAV capsid protein includes or consists of a sequence at least 80%, 85%, 85%, 87%, 88%, 89%, 90%, 91%, 92%, 93%, 94%, 95%, 96%, 97%, 98%, 99%, 99.1%, 99.2%, 99.3%, 99.4%, 99.5%, etc., up to 99.9% identical to a reference or parental AAV capsid protein, such as AAV1, AAV2, AAV3, AAV4, AAV5, AAV6, AAV7, AAV8, AAV9, AAV10, AAV11, AAV12, Rh10, Rh74 (SEQ ID NO: 188), AAV3B, LK03 (SEQ ID NO: 191), AAV-2i8, SEQ ID NO: 226, SEQ ID NO: 189, and/or SEQ ID NO: 190.

[0205] In certain embodiments, a viral vector such as an adeno-associated virus (AAV) vector comprises any of the polynucleotides comprising the nucleic acids encoding C1 inhibitor as set forth herein operably linked to an expression control element.

[0206] In certain embodiments, a viral vector such as an adeno-associated virus (AAV) vector comprises any of the expression cassettes comprising the polynucleotides comprising the nucleic acids encoding C1 inhibitor as set forth herein.

[0207] In certain embodiments, an AAV vector comprises: one or more of an AAV capsid; and one or more AAV inverted terminal repeats (ITRs), wherein the AAV ITR(s) flanks the 5′ or 3′ terminus of the polynucleotide or the expression cassette.

[0208] In certain embodiments, an AAV vector further comprises an intron positioned 5′ or 3′ of one or more ITRs.

[0209] In certain embodiments, an AAV vector comprising at least one or more ITRs or an intron has the one or more ITRs or intron modified to have reduced CpGs.

[0210] In certain embodiments, the instant invention relates to an AAV vector comprising,
[0211] (1) a 5′ AAV ITR, optionally a 5′ ITR of AAV2, optionally a 5′ ITR comprising the polynucleotide sequence of SEQ ID NO: 70 or 72;
[0212] (2) one or more enhancers, optionally one or more enhancers having a polynucleotide sequence selected from the group consisting of SEQ ID NOs: 225, 74-78 and 173-178;
[0213] (3) one or more 5′ UTRs, optionally one or more 5′ UTRs having a polynucleotide sequence selected from the group consisting of SEQ ID NOs: 180 and 183;
[0214] (4) optionally an intron, optionally an intron having the polynucleotide sequence of SEQ ID NO: 81 or 82;
[0215] (5) a nucleic acid encoding a signal peptide, optionally the signal peptide comprising an amino acid sequence selected from the group consisting of SEQ ID NOs: 203-218, optionally a polynucleotide sequence selected from the group consisting of SEQ ID NOs: 84-103;
[0216] (6) a nucleic acid encoding at least one of a C1 inhibitor, a variant C1 inhibitor, and a fusion or combination thereof,
   [0217] a. optionally, a C1 inhibitor having the amino acid sequence of SEQ ID NO: 181 or 192, optionally a polynucleotide sequence selected from the group consisting of SEQ ID NOs: 104-142, 145-147, 156, and 171-172;
   [0218] b. optionally, a variant C1 inhibitor having an amino acid sequence selected from the group consisting of SEQ ID NOs: 193-201, optionally a polynucleotide selected from the group consisting of SEQ ID NOs: 143-144, 158, and 165-170;
[0219] (7) one or more 3′ UTRs, optionally one or more 3′ UTRs having the polynucleotide sequence of SEQ ID NO: 83 or 184;
[0220] (8) optionally a miRNA binding site, optionally an miRNA binding site having the polynucleotide sequence of SEQ ID NO: 179;
[0221] (9) optionally a regulated Irel-dependent decay (RIDD) sequence, optionally a RIDD having the polynucleotide sequence selected from the group consisting of SEQ ID NOs: 185-187; and
[0222] (10) a 3′ AAV ITR, optionally a 3′ ITR of AAV2, optionally a 3′ ITR comprising the polynucleotide sequence of SEQ ID NO: 71 or 73.

[0223] In certain embodiments an AAV vector comprises a polynucleotide that comprises a nucleic acid encoding a C1 inhibitor, wherein the nucleic acid is CpG-reduced compared to a wild-type coding sequence of C1 inhibitor, and the polynucleotide is encapsidated by a capsid comprising VP1 of SEQ ID NO: 226. In certain embodiments the capsid comprises VP1 of SEQ ID NO: 226, VP2 of SEQ ID NO: 189 and VP3 of SEQ ID NO: 190. In certain embodiments, the polynucleotide comprises a nucleic acid sequence at least 99% identical to SEQ ID NO: 22, provided that the nucleic acid sequence encodes SEQ ID NO: 192. In certain embodiments, the nucleic acid sequence comprises SEQ ID NO: 22. In certain embodiments the polynucleotide comprises a nucleic acid sequence at least 99% or 100% identical to SEQ ID NO: 22; and the capsid comprises VP1 of SEQ ID NO: 226. In certain embodiments the polynucleotide comprises a nucleic acid sequence at least 99% or 100% identical to SEQ ID NO: 22; and the capsid comprises VP1 of SEQ ID NO: 226, VP2 of SEQ ID NO: 189 and VP3 of SEQ ID NO: 190.

[0224] In certain embodiments, an AAV vector of the instant invention is delivered via a non-viral delivery system, including for example, encapsulated in a lipid nanoparticle (LNP).

### Non-Viral Methods

[0225] In certain embodiments, the polynucleotides and expression cassettes of the instant invention are delivered or administered with a non-viral delivery system. Non-viral delivery systems include for example, chemical methods, such as non-viral vectors, or extracellular vesicles and physical methods, such as gene gun, electroporation, particle bombardment, ultrasound utilization and magnetofection.

[0226] Recombinant cells capable of expressing the C1 inhibitor sequences of the instant invention can be used for delivery or administration.

[0227] Naked DNA such as minicircles and transposons can be used for administration or delivery or lentiviral vectors. Additionally, gene editing technologies such as zinc finger nucleases, meganucleases, TALENs, and CRISPR can also be used to deliver the coding sequence of the instant invention.

[0228] In certain embodiments, the polynucleotides and expression cassettes of the instant invention are delivered as naked DNA, minicircles, transposons, of closed-ended linear duplex DNA.

[0229] In certain embodiments, the polynucleotides and expression cassettes of the instant invention are delivered or administered in AAV vector particles, or other viral particles, that are further encapsulated or complexed with liposomes, nanoparticles, lipid nanoparticles, polymers, microparticles, microcapsules, micelles, or extracellular vesicles.

[0230] In certain embodiments, the polynucleotides and expression cassettes of the instant invention are delivered or administered with non-viral vectors.

[0231] As used herein, a “non-viral vector” refers to a vector that is not delivered by viral particles or by viral-like particles (VLPs). According to certain embodiments, a non-viral vector is a vector that is not delivered by a capsid. The vector can be encapsulated, admixed, or otherwise associated with a non-viral delivery particle or nanoparticle.

[0232] Any suitable non-viral delivery system known to those skilled in the art in view of the present disclosure can be used in the instant invention. A non-viral delivery particle or nanoparticle can be, for example, a lipid-based nanoparticle, a polymer-based nanoparticle, a protein-based nanoparticle, a microparticle, a microcapsule, a metallic particle-based nanoparticle, a peptide cage nanoparticle, etc.

[0233] A non-viral delivery particle or nanoparticle of the instant invention can be constructed by any method known in the art, and a non-viral vector of the instant invention comprising a nucleic acid molecule comprising a therapeutic transgene can be constructed by any method known in the art.

### Lipid-Based Delivery Systems

[0234] Lipid-based delivery systems are well known in the art, and any suitable lipid-based delivery system known to those skilled in the art in view of the present disclosure can be used in the instant invention. Examples of lipid-based delivery systems include, e.g., liposomes, lipid nanoparticles, micelles, or extracellular vesicles.

[0235] A “lipid nanoparticle” or “LNP” refers to a lipid-based vesicle useful for delivery of AAV and non-viral vectors having dimensions on the nanoscale, i.e., from about 10 nm to about 1000 nm, or from about 50 to about 500 nm, or from about 75 to about 127 nm.

[0236] Without being bound by theory, an LNP is believed to provide a polynucleotide, expression cassette, AAV vector, or non-viral vector with partial or complete shielding from the immune system. Shielding allows delivery of the polynucleotide, expression cassette, AAV vector, or non-viral vector to a tissue or cell while avoiding inducing a substantial immune response against the polynucleotide, expression cassette, AAV vector, or non-viral vector in vivo.

[0237] Shielding can also allow repeated administration without inducing a substantial immune response against the polynucleotide, expression vector, AAV vector, or non-viral vector in vivo (e.g., in a subject such as a human). Shielding can also improve or increase polynucleotide, expression cassette, AAV vector, or non-viral vector delivery efficiency in vivo.

[0238] The isoelectric point (pI) of AAV is in a pH range from about 6 to about 6.5. Thus, the AAV surface carries a slight negative charge. As such it can be beneficial for an LNP to comprise a cationic lipid such as, for example, an amino lipid. Exemplary amino lipids have been described in U.S. Pat. Nos. 9,352,042, 9,220,683, 9,186,325, 9,139,554, 9,126,966 9,018,187, 8,999,351, 8,722,082, 8,642,076, 8,569,256, 8,466,122, and 7,745,651 and U.S. Patent Publication Nos. 2016/0213785, 2016/0199485, 2015/0265708, 2014/0288146, 2013/0123338, 2013/0116307, 2013/0064894, 2012/0172411, and 2010/0117125, the disclosures of which are herein incorporated by reference in their entirety.

[0239] The terms “cationic lipid” and “amino lipid” are used interchangeably herein to include those lipids and salts thereof having one, two, three, or more fatty acid or fatty alkyl chains and a pH-titratable amino group (e.g., an alkylamino or dialkylamino group). The cationic lipid is typically protonated (i.e., positively charged) at a pH below the pKa of the cationic lipid and is substantially neutral at a pH above the pKa. The cationic lipids can also be titratable cationic lipids. In certain embodiments, the cationic lipids comprise: a protonatable tertiary amine (e.g., pH-titratable) group; C18 alkyl chains, wherein each alkyl chain independently has 0 to 3 (e.g., 0, 1, 2, or 3) double bonds; and ether, ester, or ketal linkages between the head group and alkyl chains.

[0240] Cationic lipids can include, without limitation, 1,2-dilinoleyloxy-N,N-dimethylaminopropane (DLinDMA), 1,2-dilinolenyloxy-N,N-dimethylaminopropane (DLenDMA), 1,2-di-y-linolenyloxy-N,N-dimethylami nopropane (g-DLenDMA), 2,2-dilinoleyl-4-(2-dimethylaminoethyl)-[1,3]-dioxolane (DLin-K-C2-DMA, also known as DLin-C2K-DMA, XTC2, and C2K), 2,2-dilinoleyl-4-dimethylaminomethyl-[1,3]-dioxolane (DLin-K-DMA), dilinoleylmethyl-3-dimethylaminopropionate (DLin-M-C2-DMA, also known as MC2), (6Z,9Z,28Z,31 Z)-heptatriaconta-6,9,28,31-tetraen-19-yl 4-(dimethylamino)butanoate (DLin-M-C3-DMA, also known as MC3), salts thereof, and mixtures thereof. Other cationic lipids also include, but are not limited to, 1,2-distearyloxy-N,N-dimethyl-3-aminopropane (DSDMA), 1,2-dioleyloxy-N,N-dimethyl-3-aminopropane (DODMA), 2,2-dilinoleyl-4-(3-dimethylaminopropyl)-[1,3]-dioxolane (DLin-K-C3-DMA), 2,2-dilinoleyl-4-(3-dimethylaminobutyl)-[1,3]-dioxolane (DLin-K-C4-DMA), DLen-C2K-DMA, y-DLen-C2K-DMA, and (DLin-MP-DMA) (also known as 1-B11).

[0241] Still further cationic lipids can include, without limitation, 2,2-dilinoleyl-5-dimethylaminomethyl-[1,3]-dioxane (DLin-K6-DMA), 2,2-dilinoleyl-4-N-methylpepiazino-[1,3]-dioxolane (DLin-K-MPZ), 1,2-dilinoleylcarbamoyloxy-3-dimethylaminopropane (DLin-C-DAP), 1,2-dilinoleyoxy-3-(dimethylamino)acetoxypropane (DLin-DAC), 1,2-dilinoleyoxy-3-morpholinopropane (DLin-MA), 1,2-dilinoleoyl-3-dimethylaminopropane (DLinDAP), 1,2-dilinoleylthio-3-dimethylaminopropane (DLin-S-DMA), 1-linoleoyl-2-linoleyloxy-3-dimethylaminopropane (DLin-2-DMAP), 1,2-dilinoleyloxy-3-trimethylaminopropane chloride salt (DLin-TMA.Cl), 1,2-dilinoleoyl-3-trimethylaminopropane chloride salt (DLin-TAP.C1), 1,2-dilinoleyloxy-3-(N-methylpiperazino)propane (DLin-MPZ), 3-(N,N-dilinoleylamino)-1,2-propanediol (DLinAP), 3-(N,N-dioleylamino)-1,2-propanedio (DOAP), 1,2-dilinoleyloxo-3-(2-N,N-dimethylamino)ethoxypropane (DLin-EG-DMA), N,N-dioleyl-N,N-dimethylammonium chloride (DODAC), N-(1-(2,3-dioleyloxy)propyl)-N,N,N-trimethylammonium chloride (DOTMA), N,N-distearyl-N,N-dimethylammonium bromide (DDAB), N-(1-(2,3-dioleoyloxy)propyl)-N,N,N-trimethylammonium chloride (DOTAP), 3-(N-(N′,N′-dimethylaminoethane)-carbamoyl)cholesterol (DC-Chol), N-(1,2-dimyristyloxyprop-3-yl)-N,N-dimethyl-N-hydroxyethyl ammonium bromide (DMRIE), 2,3-dioleyloxy-N-[2(spermine-carboxamido)ethyl]-N,N-dimethyl-1-propanaminiumtrifluoroacetate (DOSPA), dioctadecylamidoglycyl spermine (DOGS), 3-dimethylamino-2-(cholest-5-en-3-beta-oxybutan-4-oxy)-1-(cis,cis-9,12-octadecadienoxy)propane (CLinDMA), 2-[5′-(cholest-5-en-3-beta-oxy)-3′-oxapentoxy)-3-dimethyl-1-(cis,cis-9′,1-2′-octadecadienoxy)propane (CpLinDMA), N,N-dimethyl-3,4-dioleyloxybenzylamine (DMOBA), 1,2-N,N′-dioleylcarbamyl-3-dimethylaminopropane (DOcarbDAP), 1,2-N,N′-dilinoleylcarbamyl-3-dimethylaminopropane (DLincarbDAP), dexamethasone-sperimine (DS) and disubstituted spermine (D2S) or mixtures thereof.

[0242] A number of commercial preparations of cationic lipids can be used, such as, LIPOFECTIN® (including DOTMA and DOPE, available from GIBCO/BRL), and LIPOFECT AMINE® (comprising DOSPA and DOPE, available from GIBCO/BRL).

[0243] In certain embodiments, cationic lipid can be present in an amount from about 10% by weight of the LNP to about 85% by weight of the lipid nanoparticle, or from about 50% by weight of the LNP to about 75% by weight of the LNP.

[0244] Sterols can confer fluidity to the LNP. As used herein, “sterol” refers to any naturally occurring sterol of plant (phytosterols) or animal (zoosterols) origin as well as non-naturally occurring synthetic sterols, all of which are characterized by the presence of a hydroxyl group at the 3-position of the steroid A-ring. The sterol can be any sterol conventionally used in the field of liposome, lipid vesicle or lipid particle preparation, most commonly cholesterol. Phytosterols can include campesterol, sitosterol, and stigmasterol. Sterols also include sterol-modified lipids, such as those described in U.S. Patent Application Publication 2011/0177156, the disclosure of which is herein incorporated by reference in its entirety. In certain embodiments, a sterol can be present in an amount from about 5% by weight of the LNP to about 50% by weight of the lipid nanoparticle or from about 10% by weight of the LNP to about 25% by weight of the LNP.

[0245] LNP can comprise a neutral lipid. Neutral lipids can comprise any lipid species which exists either in an uncharged or neutral zwitterionic form at physiological pH. Such lipids include, without limitation, diacylphosphatidylcholine, diacylphosphatidylethanolamine, ceramide, sphingomyelin, dihydrosphingomyelin, cephalin, and cerebrosides. The selection of neutral lipids is generally guided by consideration of, inter alia, particle size and the requisite stability. In certain embodiments, the neutral lipid component can be a lipid having two acyl groups (e.g., diacylphosphatidylcholine and diacylphosphatidylethanolamine).

[0246] Lipids having a variety of acyl chain groups of varying chain length and degree of saturation are available or can be isolated or synthesized by well-known techniques. In certain embodiments, lipids containing saturated fatty acids with carbon chain lengths in the range of C14 to C22 can be used. In certain embodiments, lipids with mono or diunsaturated fatty acids with carbon chain lengths in the range of C14 to C22 are used. Additionally, lipids having mixtures of saturated and unsaturated fatty acid chains can be used. Exemplary neutral lipids include, without limitation, 1,2-dioleoyl-sn-glycero-3-phosphatidyl-ethanolamine (DOPE), 1,2-distearoyl-sn-glycero-3-phosphocholine (DSPC), 1-palmitoyl-2-oleoyl-sn-glycero-3-phosphocholine (POPC), or any related phosphatidylcholine. The neutral lipids can also be composed of sphingomyelin, dihydrosphingomyelin, or phospholipids with other head groups, such as serine and inositol.

[0247] In certain embodiments, the neutral lipid can be present in an amount from about 0.10% by weight of the lipid nanoparticle to about 75% by weight of the LNP, or from about 5% by weight of the LNP to about 15% by weight of the LNP.

[0248] LNP encapsulated nucleic acids, expression cassettes, AAV vectors, and non-viral vectors can be incorporated into pharmaceutical compositions, e.g., a pharmaceutically acceptable carrier or excipient. Such pharmaceutical compositions are useful for, among other things, administration and delivery of LNP encapsulated acids, expression cassettes, AAV vectors, and non-viral vectors to a subject in vivo or ex vivo.

[0249] Preparations of LNP can be combined with additional components. Non-limiting examples include polyethylene glycol (PEG) and sterols.

[0250] The term “PEG” refers to a polyethylene glycol, a linear, water-soluble polymer of ethylene PEG repeating units with two terminal hydroxyl groups. PEGs are classified by their molecular weights; for example, PEG 2000 has an average molecular weight of about 2,000 daltons, and PEG 5000 has an average molecular weight of about 5,000 daltons. PEGs are commercially available from Sigma Chemical Co. and other companies and include, for example, the following functional PEGs: monomethoxypolyethylene glycol (MePEG-OH), monomethoxypolyethylene glycol-succinate (MePEG-S), monomethoxypolyethylene glycol-succinimidyl succinate (MePEG-S-NHS), monomethoxypolyethylene glycol-amine (MePEG-NH2), monomethoxypolyethylene glycol-tresylate (MePEG-TRES), and monomethoxypolyethylene glycol-imidazolyl-carbonyl (MePEG-IM).

[0251] In certain embodiments, PEG can be a polyethylene glycol with an average molecular weight of about 550 to about 10,000 daltons and is optionally substituted by alkyl, alkoxy, acyl or aryl. In certain embodiments, the PEG can be substituted with methyl at the terminal hydroxyl position. In certain embodiments, the PEG can have an average molecular weight from about 750 to about 5,000 daltons, or from about 1,000 to about 5,000 daltons, or from about 1,500 to about 3,000 daltons or from about 2,000 daltons or of about 750 daltons. The PEG can be optionally substituted with alkyl, alkoxy, acyl or aryl. In certain embodiments, the terminal hydroxyl group can be substituted with a methoxy or methyl group.

[0252] PEG-modified lipids include the PEG-dialkyloxypropyl conjugates (PEG-DAA) described in U.S. Pat. Nos. 8,936,942 and 7,803,397, the disclosures of which are herein incorporated by reference in their entirety. PEG-modified lipids (or lipid-polyoxyethylene conjugates) that are useful can have a variety of “anchoring” lipid portions to secure the PEG portion to the surface of the lipid vesicle. Examples of suitable PEG-modified lipids include PEG-modified phosphatidylethanolamine and phosphatidic acid, PEG-ceramide conjugates (e.g., PEG-CerCl4 or PEG-CerC20) which are described in U.S. Pat. No. 5,820,873, the disclosure of which is herein incorporated by reference in its entirety, PEG-modified dialkylamines and PEG-modified 1,2-diacyloxypropan-3-amines. In certain embodiments, the PEG-modified lipid can be PEG-modified diacylglycerols and dialkylglycerols. In certain embodiments, the PEG can be in an amount from about 0.5% by weight of the LNP to about 20% by weight of the LNP, or from about 5% by weight of the LNP to about 15% by weight of the LNP.

[0253] Furthermore, LNP can be a PEG-modified and a sterol-modified LNP. The LNPs, combined with additional components, can be the same or separate LNPs. In other words, the same LNP can be PEG modified and sterol modified or, alternatively, a first LNP can be PEG modified and a second LNP can be sterol modified. Optionally, the first and second modified LNPs can be combined.

[0254] In certain embodiments, prior to encapsulating LNPs can have a size in a range from about 10 nm to 500 nm, or from about 50 nm to about 200 nm, or from 75 nm to about 125 nm. In certain embodiments, LNP encapsulated nucleic acid, expression vector, AAV vector, or non-viral vector can have a size in a range from about 10 nm to 500 nm.

### Polymer-Based Systems

[0255] Polymer-based delivery systems are well known in the art, and any suitable polymer-based delivery system or polymeric nanoparticle known to those skilled in the art in view of the present disclosure can be used in the instant invention. DNA can be entrapped into the polymeric matrix of polymeric nanoparticles or can be adsorbed or conjugated on the surface of the nanoparticles. Examples of commonly used polymers for gene delivery include, e.g., poly(lactic-co-glycolic acid) (PLGA), poly lactic acid (PLA), poly(ethylene imine) (PEI), chitosan, dendrimers, polyanhydride, polycaprolactone, and polymethacrylates.

[0256] The polymeric-based non-viral vectors can have different sizes, ranging from about 1 nm to about 1000 nm, optionally from about 10 nm to about 500 nm, optionally from about 50 nm to about 200 nm, optionally about 100 nm to about 150 nm, optionally about 150 nm or less.

### Protein-Based Systems

[0257] Protein-based delivery systems are well known in the art, and any suitable protein-based delivery system or cell-penetrating peptide (CPP) known to those skilled in the art in view of the present disclosure can be used in the instant invention.

[0258] CPPs are short peptides (6-30 amino acid residues) that are potentially capable of intracellular penetration to deliver therapeutic molecules. The majority of CPPs consists mainly of arginine and lysine residues, making them cationic and hydrophilic, but CPPs can also be amphiphilic, anionic, or hydrophobic. CPPs can be derived from natural biomolecules (e.g., Tat, an HIV-1 protein), or obtained by synthetic methods (e.g., poly-L-lysine, polyarginine) (Singh et al., Drug Deliv. 2018; 25(1):1996-2006). Examples of CPPs include, e.g., cationic CPPs (highly positively charged) (e.g., the Tat peptide, penetratin, protamine, poly-L-lysine, polyarginine, etc.); amphipathic CPPs (chimeric or fused peptides, constructed from different sources, contain both positively and negatively charged amino acid sequences) (e.g., transportan, VT5, bactenecin-7 (Bac7), proline-rich peptide (PPR), SAP (VRLPPP)₃, TP10, pep-1, MPG, etc.); membranotropic CPPs (exhibit both hydrophobic and amphipathic nature simultaneously, and comprise both large aromatic residues and small residues) (e.g., gH625, SPIONs-PEG-CPP NPs, etc.); and hydrophobic CPPs (contain only non-polar motifs or residues) (e.g., SG3, PFVYLI, pep-7, fibroblast growth factors (FGF), etc.).

[0259] The protein-based non-viral vectors can have different sizes, ranging from about 1 nm to about 1000 nm, optionally from about 10 nm to about 500 nm, optionally from about 50 nm to about 200 nm, optionally about 100 nm to about 150 nm, optionally about 150 nm or less.

### Peptide Cage Systems

[0260] Peptide cage-based delivery systems are well known in the art, and any suitable peptide cage-based delivery system known to those skilled in the art in view of the present disclosure can be used in the instant invention. In general, any proteinaceous material that is able to be assembled into a cage-like structure, forming a constrained internal environment, can be used. Several different types of protein “shells” can be assembled and loaded with different types of materials. For example, protein cages comprising a shell of viral coat protein(s) (e.g., from the Cowpea Chlorotic Mottle Virus (CCMV) protein coat) that encapsulate a non-viral material, as well as protein cages formed from non-viral proteins have been described (see, e.g., U.S. Pat. Nos. 6,180,389 and 6,984,386, U.S. Patent Application 20040028694, and U.S. Patent Application 20090035389, the disclosures of which are herein incorporated by reference in their entirety). Peptide cages can comprise a proteinaceous shell that self-assembles to form a protein cage (e.g., a structure with an interior cavity which is either naturally accessible to the solvent or can be made to be so by altering solvent concentration, pH, equilibria ratios).

[0261] Examples of protein cages derived from non-viral proteins include, e.g., ferritins and apoferritins, derived from both eukaryotic and prokaryotic species, e.g., 12 and 24 subunit ferritins; and protein cages formed from heat shock proteins (HSPs), e.g., the class of 24 subunit heat shock proteins that form an internal core space, the small HSP of Methanococcus jannaschii, the dodecameric Dps HSP of E. coli, the MrgA protein, etc. As will be appreciated by those in the art, the monomers of the protein cages can be naturally occurring or variant forms, including amino acid substitutions, insertions and deletions (e.g., fragments) that can be made.

[0262] The protein cages can have different core sizes, ranging from about 1 nm to about 1000 nm, optionally from about 10 nm to about 500 nm, optionally from about 50 nm to about 200 nm, optionally about 100 nm to about 150 nm, optionally about 150 nm or less.

### Pharmaceutical Compositions

[0263] The instant invention additionally provides pharmaceutical compositions comprising any of the polynucleotides comprising the nucleic acids encoding C1 inhibitor, expression cassettes comprising polynucleotides comprising the nucleic acids encoding C1 inhibitor, viral vectors such as AAV vectors comprising polynucleotides comprising the nucleic acids encoding C1 inhibitor, or non-viral vectors comprising polynucleotides comprising the nucleic acids encoding C1 inhibitor as set forth herein.

[0264] rAAV vectors and non-viral vectors can be administered to a patient via infusion in a biologically compatible carrier, for example, via intravenous injection. rAAV vectors and non-viral vectors can be administered alone or in combination with other molecules.

[0265] Accordingly, rAAV vectors and non-viral vectors and other compositions, agents, drugs, biologics (proteins) can be incorporated into pharmaceutical compositions. Such pharmaceutical compositions are useful for, among other things, administration and delivery to a subject in vivo or ex vivo.

[0266] In certain embodiments, pharmaceutical compositions also contain a pharmaceutically acceptable carrier or excipient. Such excipients include any pharmaceutical agent that does not itself induce an immune response harmful to the individual receiving the composition, and which can be administered without undue toxicity.

[0267] As used herein the term “pharmaceutically acceptable” and “physiologically acceptable” mean a biologically acceptable formulation, gaseous, liquid or solid, or mixture thereof, which is suitable for one or more routes of administration, in vivo delivery or contact. A “pharmaceutically acceptable” or “physiologically acceptable” composition is a material that is not biologically or otherwise undesirable, e.g., the material can be administered to a subject without causing substantial undesirable biological effects. Thus, such a pharmaceutical composition can be used, for example in administering a polynucleotide, vector, viral particle or protein to a subject.

[0268] Pharmaceutically acceptable excipients include, but are not limited to, liquids such as water, saline, glycerol, sugars and ethanol. Pharmaceutically acceptable salts can also be included therein, for example, mineral acid salts such as hydrochlorides, hydrobromides, phosphates, sulfates, and the like; and the salts of organic acids such as acetates, propionates, malonates, benzoates, and the like. Excipients also include proteins such as albumin.

[0269] Additionally, auxiliary substances, such as wetting or emulsifying agents, pH buffering substances, and the like, can be present in such vehicles.

[0270] The pharmaceutical composition can be provided as a salt and can be formed with many acids, including but not limited to, hydrochloric, sulfuric, acetic, lactic, tartaric, malic, succinic, etc. Salts tend to be more soluble in aqueous or other protonic solvents than are the corresponding, free base forms. In other cases, a preparation can be a lyophilized powder which can contain any or all of the following: 1-50 mM histidine, 0.1%-2% sucrose, and 2-7% mannitol, at a pH range of 4.5 to 5.5, that is combined with buffer prior to use.

[0271] Pharmaceutical compositions include solvents (aqueous or non-aqueous), solutions (aqueous or non-aqueous), emulsions (e.g., oil-in-water or water-in-oil), suspensions, syrups, elixirs, dispersion and suspension media, coatings, isotonic and absorption promoting or delaying agents, compatible with pharmaceutical administration or in vivo contact or delivery. Aqueous and non-aqueous solvents, solutions and suspensions can include suspending agents and thickening agents. Such pharmaceutically acceptable carriers include tablets (coated or uncoated), capsules (hard or soft), microbeads, powder, granules and crystals. Supplementary active compounds (e.g., preservatives, antibacterial, antiviral and antifungal agents) can also be incorporated into the compositions.

[0272] Pharmaceutical compositions can be formulated to be compatible with a particular route of administration or delivery, as set forth herein or known to one of skill in the art. Thus, pharmaceutical compositions include carriers, diluents, or excipients suitable for administration by various routes.

[0273] Compositions suitable for parenteral administration comprise aqueous and non-aqueous solutions, suspensions or emulsions of the active compound, which preparations are typically sterile and can be isotonic with the blood of the intended recipient. Non-limiting illustrative examples include water, buffered saline, Hanks' solution, Ringer's solution, dextrose, fructose, ethanol, animal, vegetable or synthetic oils. Aqueous injection suspensions can contain substances which increase the viscosity of the suspension, such as sodium carboxymethyl cellulose, sorbitol, or dextran.

[0274] Additionally, suspensions of the active compounds can be prepared as appropriate oil injection suspensions. Suitable lipophilic solvents or vehicles include fatty oils such as sesame oil, or synthetic fatty acid esters, such as ethyl oleate or triglycerides, or liposomes. Optionally, the suspension can also contain suitable stabilizers or agents which increase the solubility of the compounds to allow for the preparation of highly concentrated solutions.

[0275] Cosolvents and adjuvants can be added to the formulation. Non-limiting examples of cosolvents contain hydroxyl groups or other polar groups, for example, alcohols, such as isopropyl alcohol; glycols, such as propylene glycol, polyethyleneglycol, polypropylene glycol, glycol ether; glycerol; polyoxyethylene alcohols and polyoxyethylene fatty acid esters. Adjuvants include, for example, surfactants such as, soya lecithin and oleic acid; sorbitan esters such as sorbitan trioleate; and polyvinylpyrrolidone.

[0276] In certain embodiments, a pharmaceutical composition comprising any of the AAV vectors as set forth herein, further comprises empty AAV capsids. In certain embodiments, in a pharmaceutical composition comprising AAV vectors and empty AAV capsids, the ratio of the empty AAV capsids to the AAV vector is within or between about 100:1-50:1, from about 50:1-25:1, from about 25:1-10:1, from about 10: 1-1:1, from about 1:1-1:10, from about 1:10-1:25, from about 1:25-1:50, or from about 1:50-1:100. In certain embodiments, in a pharmaceutical composition comprising AAV vectors and empty AAV capsids, the ratio of the of the empty AAV capsids to the AAV vector is about 2:1, 3:1, 4:1, 5:1, 6:1, 7:1, 8:1, 9:1, or 10:1.

[0277] In certain embodiments, a pharmaceutical composition includes a surfactant.

[0278] After pharmaceutical compositions have been prepared, they can be placed in an appropriate container and labeled for treatment. Such labeling could include amount, frequency, and method of administration.

[0279] Pharmaceutical compositions and delivery systems appropriate for the compositions, methods and uses of the instant invention are known in the art (see, e.g., Remington: The Science and Practice of Pharmacy (2003) 20th ed., Mack Publishing Co., Easton, PA; Remington's Pharmaceutical Sciences (1990) 18th ed., Mack Publishing Co., Easton, PA; The Merck Index (1996) 12th ed., Merck Publishing Group, Whitehouse, NJ; Pharmaceutical Principles of Solid Dosage Forms (1993), Technomic Publishing Co., Inc., Lancaster, Pa.; Ansel and Stoklosa, Pharmaceutical Calculations (2001) 11th ed., Lippincott Williams & Wilkins, Baltimore, MD; and Poznansky et al., Drug Delivery Systems (1980), R. L. Juliano, ed., Oxford, N.Y., pp. 253-315).

[0280] An “effective amount” or “sufficient amount” refers to an amount that provides, in single or multiple doses, alone or in combination, with one or more other compositions (therapeutic or immunosuppressive agents such as a drug), treatments, protocols, or therapeutic agents, a detectable response of any duration of time (long or short term), an expected or desired outcome in or a benefit to a subject of any measurable or detectable degree or for any duration of time (e.g., for minutes, hours, days, months, years, or cured).

[0281] Compositions such as pharmaceutical compositions can be delivered to a subject, so as to allow production of the encoded protein. In certain embodiments, pharmaceutical compositions comprise sufficient genetic material to enable a recipient to produce a therapeutically effective amount of a protein in the subject.

[0282] A “therapeutically effective amount” refers to an amount of an active ingredient or component that elicits the desired biological or medicinal response in a subject. A therapeutically effective amount can be determined empirically and in a routine manner, in relation to the stated purpose. For example, in vitro assays can optionally be employed to help identify optimal dosage ranges. Selection of a particular effective dose can be determined (e.g., via clinical trials) by those skilled in the art based upon the consideration of several factors, including the disease to be treated or prevented, the symptoms involved, the patient's body mass, the patient's immune status and other factors known by the skilled artisan. The precise dose to be employed in the formulation will also depend on the route of administration, and the severity of disease, and should be decided according to the judgment of the practitioner and each patient's circumstances. Effective doses can be extrapolated from dose-response curves derived from in vitro or animal model test systems.

[0283] Compositions can be formulated and/or administered in any sterile, biocompatible pharmaceutical carrier, including, but not limited to, saline, buffered saline, dextrose, and water. The compositions can be formulated and/or administered to a patient alone, or in combination with other agents (e.g., co-factors) which influence hemostasis.

### Methods of Treatment

[0284] HAE treatment with C1-INI-H-replacement therapy increases survival, reduces attack frequency and severity, and is a current standard of care for HAE disease patients. However, current treatment modalities have several drawbacks such as the potential for breakthrough attacks, safety/tolerability, high patient burden, and potential for limited compliance. HAE gene transfer treatment preferably overcomes on or more of these drawbacks to C1-INH-replacement therapy. For example, HAE gene transfer treatment described herein is expected to require less frequent dosing, preferably a single dose will be sufficient.

[0285] The instant invention still further provides methods of treating a subject in need of C1 inhibitor, comprising administering to the subject a therapeutically effective amount of a polynucleotide, expression cassette, AAV vector, non-viral vector, or pharmaceutical composition of the instant invention, wherein the C1 inhibitor is expressed in the subject.

[0286] Methods and uses of the instant invention include delivering (transducing) polynucleotide (transgene) into host cells, including dividing and/or non-dividing cells. The polynucleotides, expression cassettes, rAAV vectors, non-viral vectors, methods, uses and pharmaceutical formulations of the instant invention are additionally useful in a method of delivering, administering or providing sequence encoded by heterologous nucleic acid to a subject in need thereof, as a method of treatment. In this manner, the polynucleotide comprising the nucleic acid is transcribed and a protein produced in vivo in a subject. The subject can benefit from or be in need of the protein because the subject has a deficiency of the protein, or because production of the protein in the subject can impart some therapeutic effect, as a method of treatment or otherwise.

[0287] The instant invention is useful in animals including human and veterinary medical applications. Suitable subjects therefore include mammals, such as humans, as well as non-human mammals. The term “subject” refers to an animal, typically a mammal, such as humans, non-human primates (apes, gibbons, gorillas, chimpanzees, orangutans, macaques), a domestic animal (dogs and cats), a farm animal (poultry such as chickens and ducks, horses, cows, goats, sheep, pigs), and experimental animals (mouse, rat, rabbit, guinea pig). Human subjects include fetal, neonatal, infant, juvenile and adult subjects. Subjects include animal disease models, for example, mouse and other animal models of protein/enzyme deficiencies such as HAE, and others known to those of skill in the art.

[0288] Subjects appropriate for treatment in accordance with the instant invention include those having or at risk of producing an insufficient amount of C1 inhibitor, or producing an aberrant, partially functional or non-functional C1 inhibitor. Subjects can be tested for C1 inhibitor activity to determine if such subjects are appropriate for treatment according to a method of the instant invention. Subjects appropriate for treatment in accordance with the instant invention also include those subjects that would benefit from C1 inhibitor. Such subjects that can benefit from C1 inhibitor include those having a complement-mediated disorder. Treated subjects can be monitored after treatment periodically, e.g., every 1-4 weeks, 1-6 months, 6-12 months, or 1, 2, 3, 4, 5 or more years.

[0289] Subjects can be tested for an immune response, e.g., antibodies against AAV. Candidate subjects can therefore be screened prior to treatment according to a method of the instant invention. Subjects also can be tested for antibodies against AAV after treatment, and optionally monitored for a period of time after treatment. Subjects having pre-existing or developing AAV antibodies can be treated with an immunosuppressive agent, or other regimen as set forth herein.

[0290] Subjects appropriate for treatment in accordance with the instant invention also include those having or at risk of producing antibodies against AAV. rAAV vectors can be administered or delivered to such subjects using several techniques. For example, AAV empty capsid (i.e., AAV particles lacking a modified nucleic acid encoding C1 inhibitor) can be delivered to bind to the AAV antibodies in the subject thereby allowing the rAAV vector comprising the heterologous nucleic acid to transduce cells of the subject. The terms “AAV empty capsid,” “AAV empty capsid particle(s),” “empty capsid AAV,” “empty capsid AAV particle(s)” are used interchangeably herein.

[0291] The modified nucleic acids, expression cassettes, rAAV vectors, and non-viral vectors of the instant invention can be used for treatment of a C1 inhibitor deficiency. Accordingly, in certain embodiments, modified nucleic acids encoding C1 inhibitor, expression cassettes comprising modified nucleic acids encoding C1 inhibitor, rAAV vectors, and non-viral vectors of the instant invention can be used as a therapeutic and/or prophylactic agent.

[0292] In certain embodiments, the modified nucleic acids encoding C1 inhibitor, expression cassettes comprising modified nucleic acids encoding C1 inhibitor, rAAV vectors, and non-viral vectors of the instant invention can be used for treatment of HAE. Administration of modified nucleic acids encoding C1 inhibitor, expression cassettes comprising modified nucleic acids encoding C1 inhibitor, rAAV vectors, and non-viral vectors of the instant invention to a patient with HAE leads to the expression of the C1 inhibitor protein.

[0293] In certain embodiments, a method according to the instant invention can result in expression or activity of C1 inhibitor at a level that is at least 1%, at least 5%, at least 10%, at least 15%, at least 20%, at least 25%, at least 30%, at least 35%, at least 40%, at least 45%, or at least 50%, at least 55%, at least 60%, at least 65%, at least 70%, at least 75%, at least 80%, at least 85%, at least 90%, at least 95%, at least 100% of normal expression of the C1 inhibitor protein found in a subject not in need of C1 inhibitor.

[0294] Subjects, animals or patients administered the modified nucleic acids encoding C1 inhibitor, expression cassettes comprising modified nucleic acids encoding C1 inhibitor, rAAV vectors, and non-viral vectors of the instant invention can be evaluated by a variety of tests, assays and functional assessments to demonstrate, measure and/or assess efficacy of the modified nucleic acids encoding C1 inhibitor, expression cassettes comprising modified nucleic acids encoding C1 inhibitor, rAAV vectors, and non-viral vectors of the instant invention as therapeutic and/or prophylactic agents. Such tests and assays include, but are not limited to, measurement of C1 inhibitor activity (such as by use of standard C1 inhibitor activity assays) and/or C1 inhibitor amount (such as by western blot with anti-C1 inhibitor antibody) in a biological sample such as blood or plasma; analysis of peak and steady-state vector-derived C1 inhibitor enzyme levels assessed by total C1 inhibitor protein and activity in plasma; testing for immune responses against AAV capsid; and testing for immune responses against the C1 inhibitor transgene protein product.

[0295] Additionally, the modified nucleic acids encoding C1 inhibitor, expression cassettes comprising modified nucleic acids encoding C1 inhibitor, rAAV vectors, and non-viral vectors of the instant invention can be used for treatment of a complement-mediated disorder. According to certain embodiments, the modified nucleic acids encoding C1 inhibitor, expression cassettes comprising modified nucleic acids encoding C1 inhibitor, rAAV vectors, and non-viral vectors of the instant invention can be used for treatment of a patient in need of C1 inhibitor. According to certain embodiments, the modified nucleic acids encoding C1 inhibitor, expression cassettes comprising modified nucleic acids encoding C1 inhibitor, rAAV vectors, and non-viral vectors of the instant invention can be used for treatment of hereditary angioedema (HAE).

[0296] As used herein, the term “hereditary angioedema” or “HAE” refers to a blood disorder characterized by unpredictable and recurrent attacks of inflammation. HAE is typically associated with CT-INH deficiency, which may be the result of low levels of C1-INH or C1-INH with impaired or decreased activity. Symptoms include, but are not limited to, swelling that can occur in any part of the body, such as the face, extremities, genitals, gastrointestinal tract, and upper airways. As used herein, the HAE can be Type I, Type II, or Type III.

[0297] As set forth herein, rAAV are useful as gene therapy vectors as they can penetrate cells and introduce nucleic acid/genetic material into the cells. Because AAV are not associated with pathogenic disease in humans, rAAV vectors are able to deliver heterologous polynucleotide sequences (e.g., therapeutic proteins and agents) to human patients without causing substantial AAV pathogenesis or disease.

[0298] rAAV vectors possess a number of desirable features for such applications, including tropism for dividing and non-dividing cells. Early clinical experience with these vectors also demonstrated no sustained toxicity, and immune responses are typically minimal or undetectable. AAV are known to infect a wide variety of cell types in vivo by receptor-mediated endocytosis or by transcytosis. These vector systems have been tested in humans targeting many tissues, such as, retinal epithelium, liver, skeletal muscle, airways, brain, joints and hematopoietic stem cells.

[0299] It can be desirable to introduce a rAAV vector that can provide, for example, multiple copies of C1 inhibitor and hence greater amounts of C1 inhibitor protein. Improved rAAV vectors and methods for producing these vectors have been described in detail in a number of references, patents, and patent applications, including: Wright J. F. (Hum. Gene Ther., 20:698-706, 2009).

[0300] Doses can vary and depend upon the type, onset, progression, severity, frequency, duration, or probability of the disease to which treatment is directed, the clinical endpoint desired, previous or simultaneous treatments, the general health, age, gender, race or immunological competency of the subject and other factors that will be appreciated by the skilled artisan. The dose amount, number, frequency or duration can be proportionally increased or reduced, as indicated by any adverse side effects, complications or other risk factors of the treatment or therapy and the status of the subject. The skilled artisan will appreciate the factors that can influence the dosage and timing required to provide an amount sufficient for providing a therapeutic or prophylactic benefit.

[0301] The dose to achieve a therapeutic effect, e.g., the dose in vector genomes/per kilogram of body weight (vg/kg) of rAAV, or the dose of non-viral vector, will vary based on several factors including, but not limited to: route of administration, the level of heterologous polynucleotide expression required to achieve a therapeutic effect, the specific disease treated, any host immune response to the viral vector, a host immune response to the heterologous polynucleotide or expression product (protein), and the stability of the protein expressed. One skilled in the art can determine a rAAV/vector genome or non-viral vector dose range to treat a patient having a particular disease or disorder based on the aforementioned factors, as well as other factors.

[0302] Generally, doses of rAAVs will range from at least 1×10⁸ vector genomes per kilogram (vg/kg) of the weight of the subject, or more, for example, 1×10⁹, 1×10¹⁰, 1×10¹¹, 1×10¹², 1×10¹³ or 1×10¹⁴, or more, vector genomes per kilogram (vg/kg) of the weight of the subject, to achieve a therapeutic effect.

[0303] For example, a dose of about 2×10¹¹ recombinant AAV vg/kg or greater than about 2×10¹¹ recombinant AAV vg/kg; a dose of about 3×10¹¹ recombinant AAV vg/kg or greater than about 3×10¹¹ recombinant AAV vg/kg; a dose of about 4×10¹¹ recombinant AAV vg/kg or greater than about 4×10¹¹ recombinant AAV vg/kg; a dose of about 5×10¹¹ recombinant AAV vg/kg or greater than about 5×10¹¹ recombinant AAV vg/kg; a dose of about 1×10¹² recombinant AAV vg/kg or greater than about 1×10¹² recombinant AAV vg/kg; a dose of about 2×10¹² recombinant AAV vg/kg or greater than about 2×10¹² recombinant AAV vg/kg; a dose of about 3×10¹² recombinant AAV vg/kg or greater than about 3×10¹² recombinant AAV vg/kg; a dose of about 4×10¹² recombinant AAV vg/kg or greater than about 4×10¹² recombinant AAV vg/kg; a dose of about 5×10¹² recombinant AAV vg/kg or greater than about 5×10¹² recombinant AAV vg/kg; a dose of about 1×10¹³ recombinant AAV vg/kg or greater than about 1×10¹³ recombinant AAV vg/kg; a dose of about 2×10¹³ recombinant AAV vg/kg or greater than about 2×10¹³ recombinant AAV vg/kg; a dose of about 3×10¹³ recombinant AAV vg/kg or greater than about 3×10¹³ recombinant AAV vg/kg; a dose of about 4×10¹³ recombinant AAV vg/kg or greater than about 4×10¹³ recombinant AAV vg/kg; a dose of about 5×10¹³ recombinant AAV vg/kg or greater than about 5×10¹³ recombinant AAV vg/kg.

[0304] Exemplary dose ranges of recombinant AAV vg/kg administered are a dose range from about 1.5×10¹¹ to about 5×10¹³ recombinant AAV vg/kg; a dose range from about 1.5×10¹¹ to about 2×10¹¹ recombinant AAV vg/kg; a dose range from about 2×10¹¹ to about 2.5×10¹¹ recombinant AAV vg/kg; a dose range from about 2.5×10¹¹ to about 3×10¹¹ recombinant AAV vg/kg; a dose range from about 3×10¹¹ to about 3.5×10¹¹ recombinant AAV vg/kg; a dose range from about 3.5×10¹¹ to about 4×10¹¹ recombinant AAV vg/kg; a dose range from about 4×10¹¹ to about 4.5×10¹¹ recombinant AAV vg/kg; a dose range from about 4.5×10¹¹ to about 5×10¹¹ recombinant AAV vg/kg; a dose range from about 5×10¹¹ to about 1×10¹² recombinant AAV vg/kg; a dose range from about 1×10¹² to about 1.5×10¹² recombinant AAV vg/kg; a dose range from about 1.5×10¹² to about 2×10¹² recombinant AAV vg/kg; a dose range from about 2×10¹² to about 2.5×10¹² recombinant AAV vg/kg; a dose range from about 2.5×10¹² to about 3×10¹² recombinant AAV vg/kg; a dose range from about 3×10¹² to about 3.5×10¹² recombinant AAV vg/kg; a dose range from about 3.5×10¹² to about 4×10¹² recombinant AAV vg/kg; a dose range from about 4×10¹² to about 4.5×10¹² recombinant AAV vg/kg; a dose range from about 4.5×10¹² to about 5×10¹² recombinant AAV vg/kg; a dose range from about 5×10¹² to about 1×10¹³ recombinant AAV vg/kg; a dose range from about 1×10¹³ to about 1.5×10¹³ recombinant AAV vg/kg; a dose range from about 1.5×10¹³ to about 2×10¹³ recombinant AAV vg/kg; a dose range from about 2×10¹³ to about 2.5×10¹³ recombinant AAV vg/kg; a dose range from about 2.5×10¹³ to about 3×10¹³ recombinant AAV vg/kg; a dose range from about 3×10¹³ to about 3.5×10¹³ recombinant AAV vg/kg; a dose range from about 3.5×10¹³ to about 4×10¹³ recombinant AAV vg/kg; a dose range from about 4×10¹³ to about 4.5×10¹³ recombinant AAV vg/kg; a dose range from about 4.5×10¹³ to about 5×10¹³ recombinant AAV vg/kg; and a dose range from about 5×10¹³ to about 1×10¹⁴ recombinant AAV vg/kg.

[0305] In certain embodiments, AAV vg/kg are administered at a dose of about 1×10¹¹ vg/kg, administered at a dose of about 2×10¹¹ vg/kg, administered at a dose of about 3×10¹¹ vg/kg, administered at a dose of about 4×10¹¹ vg/kg, administered at a dose of about 5×10¹¹ vg/kg, administered at a dose of about 6×10¹¹ vg/kg, administered at a dose of about 7×10¹¹ vg/kg, administered at a dose of about 8×10¹¹ vg/kg, administered at a dose of about 9×10¹¹ vg/kg, administered at a dose of about 1×10¹² vg/kg, administered at a dose of about 2×10¹² vg/kg, administered at a dose of about 3×10¹² vg/kg, administered at a dose of about 4×10¹² vg/kg, administered at a dose of about 5×10¹² vg/kg, administered at a dose of about 6×10¹² vg/kg, administered at a dose of about 7×10¹² vg/kg, administered at a dose of about 8×10¹² vg/kg, administered at a dose of about 9×10¹² vg/kg, administered at a dose of about 1×10¹³ vg/kg, administered at a dose of about 2×10¹³ vg/kg, administered at a dose of about 3×10¹³ vg/kg, administered at a dose of about 4×10¹³ vg/kg, administered at a dose of about 5×10¹³ vg/kg, administered at a dose of about 6×10¹³ vg/kg, administered at a dose of about 7×10¹³ vg/kg, administered at a dose of about 8×10¹³ vg/kg, administered at a dose of about 9×10¹³ vg/kg.

[0306] A “unit dosage form” as used herein refers to physically discrete units suited as unitary dosages for the subject to be treated; each unit containing a predetermined quantity optionally in association with a pharmaceutical carrier (excipient, diluent, vehicle or filling agent) which, when administered in one or more doses, is calculated to produce a desired effect (e.g., prophylactic or therapeutic effect). Unit dosage forms can be within, for example, ampules and vials, which can include a liquid composition, or a composition in a freeze-dried or lyophilized state; a sterile liquid carrier, for example, can be added prior to administration or delivery in vivo. Individual unit dosage forms can be included in multi-dose kits or containers. rAAV particles, non-viral vectors, and pharmaceutical compositions thereof can be packaged in single or multiple unit dosage form for ease of administration and uniformity of dosage.

[0307] The doses of an “effective amount” or “sufficient amount” for treatment (e.g., to ameliorate or to provide a therapeutic benefit or improvement) typically are effective to provide a response to one, multiple or all adverse symptoms, consequences or complications of the disease, one or more adverse symptoms, disorders, illnesses, pathologies, or complications, for example, caused by or associated with the disease, to a measurable extent, although decreasing, reducing, inhibiting, suppressing, limiting or controlling progression or worsening of the disease is a satisfactory outcome.

[0308] In certain embodiments, a method according to the instant invention reduces, decreases or inhibits one or more symptoms of the need for C1 inhibitor or of HAE; or prevents or reduces progression or worsening of one or more symptoms of the need for C1 inhibitor or of HAE; or stabilizes one or more symptoms of the need for C1 inhibitor or of HAE; or improves one or more symptoms of the need for C1 inhibitor or of HAE.

[0309] An effective amount or a sufficient amount can but need not be provided in a single administration, can require multiple administrations, and, can but need not be, administered alone or in combination with another composition (e.g., agent), treatment, protocol or therapeutic regimen. For example, the amount can be proportionally increased as indicated by the need of the subject, type, status and severity of the disease treated or side effects (if any) of treatment. In addition, an effective amount or a sufficient amount need not be effective or sufficient if given in single or multiple doses without a second composition (e.g., another drug or agent), treatment, protocol or therapeutic regimen, since additional doses, amounts or duration above and beyond such doses, or additional compositions (e.g., drugs or agents), treatments, protocols or therapeutic regimens can be included in order to be considered effective or sufficient in a given subject. Amounts considered effective also include amounts that result in a reduction of the use of another treatment, therapeutic regimen or protocol, such as administration of modified nucleic acid encoding C1 inhibitor for treatment of a C1 inhibitor deficiency (e.g., HAE).

[0310] Accordingly, methods and uses of the instant invention also include, among other things, methods and uses that result in a reduced need or use of another compound, agent, drug, therapeutic regimen, treatment protocol, process, or remedy. For example, for C1 inhibitor deficiency, a method or use of the instant invention has a therapeutic benefit if in a given subject, a less frequent or reduced dose or elimination of administration of a recombinant C1 inhibitor to supplement for the deficient or defective C1 inhibitor in the subject is needed. Thus, in accordance with the instant invention, methods and uses of reducing need or use of another treatment or therapy are provided.

[0311] An effective amount or a sufficient amount need not be effective in each and every subject treated, nor a majority of treated subjects in a given group or population. An effective amount or a sufficient amount means effectiveness or sufficiency in a particular subject, not a group or the general population. As is typical for such methods, some subjects will exhibit a greater response, or less or no response to a given treatment method or use.

[0312] Administration or in vivo delivery to a subject can be performed prior to development of an adverse symptom, condition, complication, etc. caused by or associated with the disease. For example, a screen (e.g., genetic) can be used to identify such subjects as candidates for invention compositions, methods and uses. Such subjects therefore include those screened positive for an insufficient amount or a deficiency in a functional gene product (e.g., C1 inhibitor or a protein deficiency that leads to a HAE), or that produce an aberrant, partially functional or non-functional gene product (e.g., C1 inhibitor or a protein implicated in HAE).

[0313] Administration or in vivo delivery to a subject in accordance with the methods and uses of the instant invention as disclosed herein can be practiced within 1-2, 2-4, 4-12, 12-24 or 24-72 hours after a subject has been identified as having the disease targeted for treatment, has one or more symptoms of the disease, or has been screened and is identified as positive as set forth herein even though the subject does not have one or more symptoms of the disease. Of course, methods and uses of the instant invention can be practiced 1-7, 7-14, 14-24, 24-48, 48-64 or more days, months or years after a subject has been identified as having the disease targeted for treatment, has one or more symptoms of the disease, or has been screened and is identified as positive as set forth herein.

[0314] The term “ameliorate” means a detectable or measurable improvement in a subject's disease or symptom thereof, or an underlying cellular response. A detectable or measurable improvement includes a subjective or objective decrease, reduction, inhibition, suppression, limit or control in the occurrence, frequency, severity, progression, or duration of the disease, or complication caused by or associated with the disease, or an improvement in a symptom or an underlying cause or a consequence of the disease, or a reversal of the disease.

[0315] For HAE disease, an effective amount would be an amount that improves markers for HAE disease, such as subcutaneous edema, and swelling in any part of the body, such as the face, extremities, genitals, gastrointestinal tract, and upper airways, and biomarkers such as levels of C1 inhibitor antigen and activity, levels of complement C4 (C4 levels are below normal in 95% of patients with HAE, even when asymptomatic), and levels of bradykinin.

[0316] Improvement of biomarkers for HAE includes increased levels of C1 inhibitor antigen and activity, increased or stabilized levels of complement C4 (low circulating levels of complement C4 is an indicator of HAE), and decreased levels of bradykinin (indicative of restoration of C1-INH function/activity). Many assays to measure or quantitate levels of complement C4 in plasma, sera or tissue are known in the art, including multiplexed assays (Lai et al., J Pharm. Biomed. Anal., 195: 113844 (2020) doi: 10.1016/j.jpba.2020.113844) and immunoassays such as radial immunodiffusion (Koelle et al., J Clin. Microbio., 16: 271-275 (1982)) and ELISA (Kaplan et al., Front. Med., 4: 206 (2017) doi: 10.3389/fmed.2017.00206).

[0317] In certain embodiments, methods and uses of the instant invention increase levels of C1 inhibitor antigen and activity in blood, plasma, sera and/or tissue of a subject. In certain embodiments, methods and uses of the instant invention decrease bradykinin levels in blood, plasma, sera and/or tissue of a subject. In certain embodiments, methods and uses of the instant invention increase or stabilize levels of complement C4 in blood plasma, sera and/or tissue of a subject.

[0318] Therapeutic doses will depend on, among other factors, the age and general condition of the subject, the severity of the disease or disorder. Thus, a therapeutically effective amount in humans will fall in a relatively broad range that can be determined by a medical practitioner based on the response of an individual patient.

[0319] Methods and uses of the instant invention include delivery and administration systemically, regionally or locally, or by any route, for example, by injection or infusion. Delivery of the pharmaceutical compositions in vivo can generally be accomplished via injection using a conventional syringe, although other delivery methods such as convection-enhanced delivery are envisioned (See e.g., U.S. Pat. No. 5,720,720, the disclosure of which is herein incorporated by reference in its entirety). For example, compositions can be delivered subcutaneously, epidermally, intradermally, intrathecally, intraorbitally, intramucosally, intranasally, intraperitoneally, intravenously, intra-pleurally, intraarterially, intracavitary, orally, intrahepatically, via the portal vein, or intramuscularly. Other modes of administration include oral and pulmonary administration, suppositories, and transdermal applications. A clinician specializing in the treatment of patients with HAE can determine the optimal route for administration of AAV vectors and non-viral vectors based on a number of criteria, including, but not limited to: the condition of the patient and the purpose of the treatment (e.g., enhanced or reduced C1 inhibitor levels).

[0320] The compositions can be administered alone. In certain embodiments, an rAAV particle or a non-viral vector provides a therapeutic effect without an immunosuppressive agent. The therapeutic effect optionally is sustained for a period of time, e.g., 2-4, 4-6, 6-8, 8-10, 10-14, 14-20, 20-25, 25-30, or 30-50 days or more, for example, 50-75, 75-100, 100-150, 150-200 days or more without administering an immunosuppressive agent. Accordingly, a therapeutic effect is provided for a period of time.

[0321] rAAV vectors, non-viral vectors, methods, and uses of the instant invention can be combined with any compound, agent, drug, treatment or other therapeutic regimen or protocol having a desired therapeutic, beneficial, additive, synergistic or complementary activity or effect. Exemplary combination compositions and treatments include second actives, such as, biologics (proteins), agents (e.g., immunosuppressive agents) and drugs.

[0322] Such biologics (proteins), agents, drugs, treatments and therapies can be administered or performed prior to, substantially contemporaneously with or following any other method or use of the instant invention.

[0323] The compound, agent, drug, treatment or other therapeutic regimen or protocol can be administered as a combination composition, or administered separately, such as concurrently or in series or sequentially (prior to or following) to delivery or administration of a polynucleotide, expression cassette, rAAV particle, or non-viral vector. The instant invention therefore provides combinations in which a method or use of the instant invention is in a combination with any compound, agent, drug, therapeutic regimen, treatment protocol, process, remedy or composition, set forth herein or known to one of skill in the art. The compound, agent, drug, therapeutic regimen, treatment protocol, process, remedy or composition can be administered or performed prior to, substantially contemporaneously with or following administration of a polynucleotide, expression cassette, non-viral vector, or rAAV particle of the instant invention, to a subject.

[0324] In certain embodiments, nucleic acids, expression vectors, non-viral vectors, or rAAV particles of the instant invention are administered to a patient in combination with an immunosuppressive agent or regimen where the patient has or is at risk of developing an immune response against the rAAV particle and/or the C1 inhibitor protein. Such immunosuppressive agent or regimen can be administered prior to, substantially at the same time or after administering a polynucleotide, expression cassette, non-viral vector, or rAAV vector of the instant invention.

[0325] In certain embodiments, a subject or patient, such as a human patient, with HAE has developed inhibitors to the C1 inhibitor protein (including anti-C1 inhibitor antibodies and/or anti-C1 inhibitor T-cells), which can occur following treatment with traditional enzyme replacement therapy (e.g., following administration of recombinantly produced C1 inhibitor protein). The development of such C1 inhibitor inhibitors can occur in patients that receive enzyme replacement therapy, particularly where the patient has undetectable C1 inhibitor levels, leading the patient's immune system to see the replacement C1 inhibitor protein as “foreign.” In certain embodiments, an HAE patient having C1 inhibitor inhibitors is administered one or more regimen intended to achieve immune tolerance or mitigate the immune response to the C1 inhibitor protein in the patient, prior to, substantially at the same time or after administering an rAAV vector or non-viral vector of the instant invention. Such regimens to achieve immune tolerance or mitigate the immune response to the C1 inhibitor protein can include administration of one or more immunosuppressive agent, including but not limited to methotrexate, rituximab, intravenous gamma globulin (IVIG), omalizumab, and synthetic vaccine particle (SVP™)-rapamycin (rapamycin encapsulated in a biodegradable nanoparticle) and/or administration of one or more immunosuppressive protocol or procedure, such as B-cell depletion, immunoadsorption, and plasmapheresis.

[0326] In certain embodiments, rAAV vector or non-viral vector is administered in conjunction with one or more immunosuppressive agents prior to, substantially at the same time or after administering an rAAV vector or a non-viral vector. In certain embodiments, the one or more immunosuppressive agents is administered, e.g., 1-12, 12-24 or 24-48 hours, or 2-4, 4-6, 6-8, 8-10, 10-14, 14-20, 20-25, 25-30, 30-50, or more than 50 days following administering an rAAV vector or a non-viral vector. Such administration of immunosuppressive agents after a period of time following administering rAAV vector or non-viral vector can be done if there is a decrease in the encoded protein or inhibitory nucleic acid after the initial expression levels for a period of time, e.g., 20-25, 25-30, 30-50, 50-75, 75-100, 100-150, 150-200 or more than 200 days following rAAV vector or non-viral vector.

[0327] In certain embodiments, an immunosuppressive agent is an anti-inflammatory agent.

[0328] In certain embodiments, an immunosuppressive agent is a steroid, e.g., a corticosteroid. In certain embodiments, an immunosuppressive agent is prednisone, prednisolone, calcineurin inhibitor (e.g., cyclosporine, tacrolimus), CD52 inhibitor (e.g., alemtuzumab), CTLA4-Ig (e.g., abatacept, belatacept), anti-CD3 mAb, anti-LFA-1 mAb (e.g., efalizumab), anti-CD40 mAb (e.g., ASKP1240), anti-CD22 mAb (e.g., epratuzumab), anti-CD20 mAb (e.g., rituximab, orelizumab, ofatumumab, veltuzumab), proteasome inhibitor (e.g., bortezomib), TACI-Ig (e.g., atacicept), anti-C5 mAb (e.g., eculizumab), mycophenolate, azathioprine, sirolimus, everolimus, TNFR-Ig (e.g., etanercept (Enbrel®), anti-TNF mAb (e.g., adalimumab (Humira®), infliximab (Remicade®; Avsola®)), tofacitinib, anti-IL-2R (e.g., basiliximab), anti-IL-17 mAb (e.g., secukinumab), anti-IL-6 mAb (e.g., anti-IL-6 antibody sirukumab, anti-IL-6 receptor antibody tocilizumab (Actemra®), IL-10 inhibitor, TGF-beta inhibitor, a B cell targeting antibody (e.g., rituximab), a mammalian target of rapamycin (mTOR) inhibitor (e.g., rapamycin), synthetic vaccine particle (SVP™)-rapamycin (rapamycin encapsulated in a biodegradable nanoparticle), intravenous gamma globulin (IVIG), omalizumab, methotrexate, a tyrosine kinase inhibitor (e.g., ibrutinib), cyclophosphamide, fingolimod, an inhibitor of B-cell activating factor (BAFF) (e.g, anti-BAFF mAb, e.g., belimumab), an inhibitor of a proliferation-inducing ligand (APRIL), anti-IL-1b mAb (e.g., canakinumab (Haris®)), a C3a inhibitor, a Tregitope (see, e.g., U.S. Pat. No. 10,213,496), or a combination and/or derivative thereof.

[0329] In certain embodiments, rAAV vector or non-viral vector is administered in conjunction with one or more immunosuppressive agents prior to, substantially at the same time or after administering an rAAV vector or a non-viral vector, and/or in conjunction with administration of one or more immunosuppressive protocol or procedure, such as B-cell depletion, immunoadsorption, and plasmapheresis.

[0330] Immune-suppression protocols, including the use of rapamycin, alone or in combination with IL-10, can be used to decrease, reduce, inhibit, prevent or block humoral and cellular immune responses to the C1 inhibitor protein. Hepatic gene transfer with AAV vectors of the instant invention can be used to induce immune tolerance to the C1 inhibitor protein through induction of regulatory T cells (Tregs) and other mechanisms. Strategies to overcome or avoid humoral immunity to AAV in systemic gene transfer include, administering high vector doses, use of AAV empty capsids as decoys to adsorb anti-AAV antibodies, administration of immunosuppressive drugs to decrease, reduce, inhibit, prevent or eradicate the humoral immune response to AAV, changing the AAV capsid serotype or engineering the AAV capsid to be less susceptible to neutralizing antibodies (Nab), use of plasma exchange cycles to adsorb anti-AAV immunoglobulins, thereby reducing anti-AAV antibody titer, and use of delivery techniques such as balloon catheters followed by saline flushing. Such strategies are described in Mingozzi et al., 2013, Blood, 122:23-36.

[0331] Additional strategies include use of AAV-specific plasmapheresis columns to selectively deplete anti-AAV antibodies without depleting the total immunoglobulin pool from plasma, as described in Bertin et al., 2020, Sci. Rep. 10:864. Apheresis strategies to remove, deplete, capture, and/or inactivate AAV antibodies in subjects are described in WO2019018439.

[0332] Ratio of AAV empty capsids to the rAAV vector can be within or between about 100: 1-50:1, from about 50: 1-25:1, from about 25:1-10:1, from about 10:1-1:1, from about 1:1-1:10, from about 1:10-1:25, from about 1:25-1:50, or from about 1:50-1:100. Ratios can also be about 2:1, 3:1, 4:1, 5:1, 6:1, 7:1, 8:1, 9:1, or 10:1.

[0333] Amounts of AAV empty capsids to administer can be calibrated based upon the amount (titer) of AAV antibodies produced in a particular subject. AAV empty capsids can be of any serotype, for example, AAV1, AAV2, AAV3, AAV4, AAV5, AAV6, AAV7, AAV8, AAV9, AAV10, AAV11, AAV12, Rh10, Rh74 (SEQ ID NO: 188), AAV3B, AAV-2i8, SEQ ID NO: 226, SEQ ID NO: 189, SEQ ID NO: 190, and/or SEQ ID NO: 191.

[0334] Alternatively, or in addition, rAAV vector or non-viral vector can be delivered by direct intramuscular injection (e.g., one or more slow-twitch fibers of a muscle). In another alternative, a catheter introduced into the femoral artery can be used to deliver rAAV vectors or non-viral vectors to liver via the hepatic artery. Non-surgical means can also be employed, such as endoscopic retrograde cholangiopancreatography (ERCP), to deliver rAAV vectors or non-viral vectors directly to the liver, thereby bypassing the bloodstream and AAV antibodies. Other ductal systems, such as the ducts of the submandibular gland, can also be used as portals for delivering rAAV vectors or non-viral vectors into a subject that develops or has preexisting anti-AAV antibodies.

[0335] Additional strategies to reduce humoral immunity to AAV include methods to remove, deplete, capture, and/or inactivate AAV antibodies, commonly referred to as apheresis and more particularly, plasmapheresis where blood products are involved. Apheresis or plasmapheresis, is a process in which a human subject's plasma is circulated ex vivo (extracorporal) through a device that modifies the plasma through addition, removal and/or replacement of components before its return to the patient. Plasmapheresis can be used to remove human immunoglobulins (e.g., IgG, IgE, IgA, IgD) from a blood product (e.g., plasma). This procedure depletes, captures, inactivates, reduces or removes immunoglobulins (antibodies) that bind AAV thereby reducing the titer of AAV antibodies in the treated subject that can contribute to AAV vector neutralization. An example is a device composed of an AAV capsid affinity matrix column. Passing blood product (e.g., plasma) through an AAV capsid affinity matrix would result in binding only of AAV antibodies, and of all isotypes (including IgG, IgM, etc.).

[0336] A sufficient amount of plasmapheresis using an AAV capsid affinity matrix is predicted to substantially remove AAV capsid antibodies, and reduce the AAV capsid antibody titer (load) in the human. In certain embodiments, titer in a treated subject is reduced substantially to low levels (to <1:5, or less, such as <1:4, or <1:3, or <1:2, or <1:1). A reduction in antibody titer will be temporary because the B lymphocytes that produce the AAV capsid antibodies would be expected to gradually cause the AAV capsid antibody titer to rebound to the steady state level prior to plasmapheresis.

[0337] In the case where a pre-existing AAV antibody titer was reduced from 1:100 to 1:1, AAV antibody titer rebounds of approximately 0.15% (corresponding to a titer of 1:1.2) 0.43% (1:1.4), 0.9% (1:1.9), 1.7% (1:2.7), and 3.4% (1:4.4), occur at 1 hour, 3 hours, 6 hours, 12 hours and 24 hours, respectively, after completion of the plasmapheresis method. Temporary removal of AAV antibodies from such a subject would correspond to a window of time (for example, of about 24 hours or less, such as 12 hours or less, or 6 hours or less, or 3 hours or less, or 2 hours or less, or 1 hour or less) during which an AAV vector could be administered to the subject and predicted to efficiently transduce target tissues without substantial neutralization of the AAV vector with the AAV antibodies.

[0338] In the case where a pre-existing AAV antibody titer was reduced from 1:1000 to 1:1, AAV antibody titer rebounds of approximately 0.15% (corresponding to a titer of 1:2.5) 0.4% (1:5.3), 0.9% (1:9.7), 1.7% (1:18), and 3.4% (1:35), occur at 1 hour, 3 hours, 6 hours, 12 hours and 24 hours, respectively, after completion of the plasmapheresis method. Thus, a window for administration of AAV vector will be comparatively shorter.

[0339] AAV antibodies can be preexisting and can be present at levels that reduce or block therapeutic C1 inhibitor gene transfer vector transduction of target cells. Alternatively, AAV antibodies can develop after exposure to AAV or administration of an AAV vector. If such antibodies develop after administration of an AAV vector, these subjects can also be treated via apheresis, more particularly, plasmapheresis.

[0340] In certain embodiments, the polynucleotides, expression cassettes, AAV vectors, and non-viral vectors of the instant invention can be used in combination with methods to reduce antibody (e.g., IgG) levels in human plasma. In certain embodiments, the polynucleotides, expression cassettes, AAV vectors, and non-viral vectors of the instant invention can be used in combination with an agent that that blocks, inhibits, or reduces the interaction of IgG with the neonatal Fc receptor (FcRn), such as an anti-FcRn antibody, to reduce IgG recycling and enhance IgG clearance in vivo, and/or an agent that decreases the circulating antibodies that bind to a viral vector, such as a recombinant viral vector, or that bind to a nucleic acid or a polypeptide, protein or peptide encoded by a therapeutic heterologous polynucleotide encapsidated by a recombinant viral vector, or that bind to the therapeutic heterologous polynucleotide.

[0341] In certain embodiments, antibody binding to a viral vector is reduced or inhibited by way of an agent that reduces interaction of IgG with FcRn, a protease or a glycosidase.

[0342] In certain embodiments, the polypeptides, expression cassettes, AAV vectors, or non-viral vectors of the instant invention can be used in combination with an endopeptidase (e.g., IdeS from Streptococcus pyogenes) or a modified variant thereof, or an endoglycosidase (e.g., S. pyogenes EndoS) or a modified variant thereof. In certain embodiments poylpeptides, expression cassettes, AAV vectors, or non-viral vectors of the instant invention are administered to a subject in combination with an endopeptidase (e.g., IdeS from Streptococcus pyogenes) or a modified variant thereof, or an endoglycosidase (e.g., EndoS from S. pyogenes) or a modified variant thereof to reduce or clear neutralizing antibodies against AAV capsid and enable treatment of patients previously viewed as not eligible for gene therapy or that develop AAV antibodies after AAV gene therapy. Such strategies are described in Leborgne et al., C., Barbon, E., Alexander, J. M. et al., 2020, Nat. Med., 26:1096-1101 (2020), doi.org/10.1038/s41591-020-0911-7.

[0343] In certain embodiments, the nucleic acids, expression cassettes, AAV vectors, and non-viral vectors of the instant invention can be used in combination with symptomatic and support therapies and medications, including, for example, Berinert®, Cinryze®, Orladeyo™ (berotralstat), Ruconest® (recombinant C1-INH), Haegarda® (plasma-derived C1-INH concentrate), lanadelumab (Takhzyro®), androgens (danazol), ecallantide, icatibant, and tranexamic acid; immunosuppressive regimens including, for example rapamycin, prednisolone, tacrolimus, and tocilizumab; or FDA approved drugs such as barbiturates, sulfonamides, and estrogen.

[0344] In certain embodiments, the polynucleotides, expression cassettes and AAV vectors of the instant invention can be used in combination with pharmacological chaperone therapy (also known as enzyme enhancement therapy), where one or more pharmacological chaperones is administered before, concomitant with, or after administration of the polynucleotide, expression cassette, AAV vector, or non-viral vectors of the instant invention, for the treatment of a complement-mediated disorder, such as HAE.

[0345] In certain embodiments, the polynucleotides, and expression cassettes of the instant invention are delivered or administered via AAV vector particles. In certain embodiments, the polynucleotides and expression cassettes of the instant invention can be delivered or administered via other types of viral particles, including retroviral, adenoviral, helper-dependent adenoviral, hybrid adenoviral, herpes simplex virus, lentiviral, poxvirus, Epstein-Barr virus, vaccinia virus, and human cytomegalovirus particles. In certain embodiments, the polynucleotides and expression cassettes of the instant invention can be delivered or administered via non-viral vectors.

### Kits

[0346] The instant invention provides kits with packaging material and one or more components therein. A kit typically includes a label or packaging insert including a description of the components or instructions for use in vitro, in vivo, or ex vivo, of the components therein. A kit can contain a collection of such components, e.g., a rAAV particle or a non-viral vector, and optionally a second active component, such as another compound, agent, drug or composition.

[0347] A kit refers to a physical structure housing one or more components of the kit.

[0348] Packaging material can maintain the components sterilely, and can be made of material commonly used for such purposes (e.g., paper, corrugated fiber, glass, plastic, foil, ampules, vials, tubes, etc.).

[0349] Labels or inserts can include identifying information of one or more components therein, dose amounts, clinical pharmacology of the active ingredient(s) including mechanism of action, pharmacokinetics and pharmacodynamics. Labels or inserts can include information identifying manufacturer information, lot numbers, manufacture location and date, and expiration dates. Labels or inserts can include information on a disease for which a kit component can be used. Labels or inserts can include instructions for the clinician or subject for using one or more of the kit components in a method, use, or treatment protocol or therapeutic regimen. Instructions can include dosage amounts, frequency or duration, and instructions for practicing any of the methods, uses, treatment protocols or prophylactic or therapeutic regimes described herein.

[0350] Labels or inserts can include information on any benefit that a component can provide, such as a prophylactic or therapeutic benefit. Labels or inserts can include information on potential adverse side effects, complications or reactions, such as warnings to the subject or clinician regarding situations where it would not be appropriate to use a particular composition. Adverse side effects or complications could also occur when the subject has, will be or is currently taking one or more other medications that can be incompatible with the composition, or the subject has, will be or is currently undergoing another treatment protocol or therapeutic regimen which would be incompatible with the composition and, therefore, instructions could include information regarding such incompatibilities.

[0351] Labels or inserts include “printed matter,” e.g., paper or cardboard, or separate or affixed to a component, a kit or packing material (e.g., a box), or attached to an ampule, tube or vial containing a kit component. Labels or inserts can additionally include a computer readable medium, such as a bar-coded printed label, a disk, optical disk such as CD- or DVD-ROM/RAM, DVD, MP3, magnetic tape, or an electrical storage media such as RAM and ROM or hybrids of these such as magnetic/optical storage media, FLASH media or memory type cards.

[0352] All of the features disclosed herein can be combined in any combination. Each feature disclosed in the specification can be replaced by an alternative feature serving a same, equivalent, or similar purpose.

[0353] The instant invention is generally disclosed herein using affirmative language to describe the numerous embodiments of the instant invention. The instant invention also specifically includes embodiments in which particular subject matter is excluded, in full or in part, such as substances or materials, method steps and conditions, protocols, or procedures. For example, in certain embodiments of the instant invention, materials and/or method steps are excluded. Thus, even though the instant invention is generally not expressed herein in terms of what the instant invention does not include, aspects that are not expressly excluded in the instant invention are nevertheless disclosed herein.

[0354] Certain embodiments of the instant invention have been described. Nevertheless, one skilled in the art, without departing from the spirit and scope of the instant invention, can make various changes and modifications of the instant invention to adapt it to various usages and conditions. Accordingly, the following examples are intended to illustrate but not limit the scope of the instant invention claimed in any way.

Sequence Table

| | Sequence |
|---|---|
| 1 | ctgcgcgctcgctcgctcactgaggccgcccgggcaaagcccgggcggcctcagtgagcgagcgagcgcgcagagagggagtggccaactccatca |
| | ctaggggttcctgcggcctagtaggctcagaggcacacaggagtttctgggctcaccctgcccccttccaacccctcagttcccatcctccagcagctgttt |
| | gtgtgctgcctctgaagtccacactgaacaaacttcagcctactcatgtccctaaaatgggcaaacattgcaagcagcaaacagcaaacacacagccctcc |
| | ctgcctgctgaccttggagctggggcagaggtcagagacctctctgggcccatgccacctccaacatccactcgaccccttggaatttcggtggagagga |
| | gcagaggttgtcctggcgtggtttaggtagtgtgagaggggtacccggggatcttgctaccagtggaacagccactaaggattctgcagtgagagcagag |
| | ggccagctaagtggtactctcccagagactgtctgactcacgccaccccctccaccttggacacaggacgctgtggtttctgagccaggtacaatgactcct |
| | ttcggtaagtgcagtggaagctgtacactgcccaggcaaagcgtccgggcagcgtagggggcgactcagatcccagccagtggacttagcccctgttt |
| | gctcctccgataactggggtgaccttggttaatattcaccagcagcctcccccgttgcccctctggatccactgcttaaatacggacgaggacagggccctg |
| | tctcctcagcttcaggcaccaccactgacctgggacagtgaatagatcctgagaacttcagggtgagtctatgggacccttgatgtttttttccccttcttttct |
| | atggttaagttcatgtcataggaaggggagaagtaacagggtacacatattgaccaaatcagggtaattttgcatttgtaattttaaaaaatgctttcttcttttaat |
| | atacttttttgtttatcttatttctaatactttccctaatctctttctttcagggcaataatgatacaatgtatcatgcctctttgcaccattctaaagaataacagtgataa |
| | tttctgggttaaggcaatagcaatatttctgcatataaatatttctgcatataaattgtaactgatgtaagaggtttcatattgctaatagcagctacaatccagcta |
| | ccattctgcttttattttctggttgggataaggctggattattctgagtccaagctaggcccttttgctaatcttgttcatacctcttatcttcctcccacagctcctgg |
| | gcaacctgctggtctctctgctggcccatcactttggcaaagcacgcgtgccaccatggcctccaggctgaccctgctgaccctcctgctgctgctgctggc |
| | tggggatagagcctcctcaaatccaaatgctaccagctccagctcccaggatccagagagtttgcaagacagaggcgaagggaaggtcgcaacaacagt |
| | tatctccaagatgctattcgttgaacccatcctggaggtttccagcttgccgacaaccaactcaacaaccaattcagccaccaaaataacagctaataccact |
| | gatgaacccaccacacaacccaccacagagcccaccacccaacccaccatccaacccacccaaccaactacccagctcccaacagattctcctaccca |
| | gcccactactgggtccttctgcccaggacctgttactctctgctctgacttggagagtcattcaacagaggccgtgttgggggatgctttggtagatttctccct |
| | gaagctctaccacgccttctcagcaatgaagaaggtggagaccaacatggccttttccccattcagcatcgccagcctccttacccaggtcctgctcgggg |
| | ctggggagaacaccaaaacaaacctggagagcatcctctcttaccccaaggacttcacctgtgtccaccaggccctgaagggcttcacgaccaaaggtgt |
| | cacctcagtctctcagattttccacagcccagacctggccataagggacacctttgtgaatgcctctcggaccctgtacagcagcagccccagagtcctaag |
| | caacaacagtgacgccaacttggagctcatcaacacctgggggccaagaacaccaacaacaagatcagccggctgctagacagtctgccctccgatac |
| | ccgccttgtcctcctcaatgctatctacctgagtgccaagtggaagacaacatttgatcccaagaaaaccagaatggaaccctttcacttcaaaaactcagtta |
| | taaaagtgcccatgatgaatagcaagaagtaccctgtggcccatttcattgaccaaactttgaaagccaaggtggggcagctgcagctctcccacaatctga |
| | gtttggtgatcctggtaccccagaacctgaaacatcgtcttgaagacatggaacaggctctcagcccttctgttttcaaggccatcatggagaaactggagat |
| | gtccaagttccagcccactctcctaacactaccccgcatcaaagtgacgaccagccaggatatgctctcaatcatggagaaattggaattcttcgatttttctta |
| | tgaccttaacctgtgtgggctgacagaggaccctgatcttcaggtttctgcgatgcagcaccagacagtgctggaactgacagagactggggtggaggcg |
| | gctgcagcctccgccatctctgtggcccgcaccctgctggtctttgaagtgcagcagcccttcctcttcgtgctctgggaccagcagcacaagttccctgtct |
| | tcatggggcgagtatatgaccccagggcctgaagatctagagctgaattcctgcagccagggggatcagcctctactgtgccttctagttgccagccatctg |
| | ttgtttgcccctcccccttgccttccttgaccctggaaggtgccactcccactgtcctttcctaataaaatgaggaaattgcatcacattgtctgagtaggtgtcat |
| | tctattctggggggtggggggggcaggacagcaagggggaggattgggaagacaatagcaggcatgctggggatgcagtgggctctatggcttctga |
| | ggcagaaagaaccagctggggctcgagatccactagggccgcaggaacccctagtgatggagttggccactccctctctgcgcgctcgctcgctcactg |
| | aggccgggcgaccaaaggtcgcccgacgcccgggctttgcccgggcggcctcagtgagcgagcgagcgcgcag |
| 2 | ctgcgcgctcgctcgctcactgaggccgcccgggcaaagcccgggcggcctcagtgagcgagcgagcgcgcagagagggagtggccaactccatca |
| | ctaggggttcctgcggcctagtaggctcagaggcacacaggagtttctgggctcaccctgcccccttccaacccctcagttcccatcctccagcagctgttt |
| | gtgtgctgcctctgaagtccacactgaacaaacttcagcctactcatgtccctaaaatgggcaaacattgcaagcagcaaacagcaaacacacagccctcc |
| | ctgcctgctgaccttggagctggggcagaggtcagagacctctctgggcccatgccacctccaacatccactcgaccccttggaatttcggtggagagga |
| | gcagaggttgtcctggcgtggtttaggtagtgtgagaggggtacccggggatcttgctaccagtggaacagccactaaggattctgcagtgagagcagag |
| | ggccagctaagtggtactctcccagagactgtctgactcacgccaccccctccaccttggacacaggacgctgtggtttctgagccaggtacaatgactcct |
| | ttcggtaagtgcagtggaagctgtacactgcccaggcaaagcgtccgggcagcgtaggcgggcgactcagatcccagccagtggacttagcccctgttt |
| | gctcctccgataactggggtgaccttggttaatattcaccagcagcctcccccgttgcccctctggatccactgcttaaatacggacgaggacagggccctg |
| | tctcctcagcttcaggcaccaccactgacctgggacagtgaatagatcctgagaacttcagggtgagtctatgggacccttgatgttttctttccccttcttttct |
| | atggttaagttcatgtcataggaaggggagaagtaacagggtacacatattgaccaaatcagggtaattttgcatttgtaattttaaaaaatgctttcttcttttaat |
| | atacttttttgtttatcttatttctaatactttccctaatctctttctttcagggcaataatgatacaatgtatcatgcctctttgcaccattctaaagaataacagtgataa |
| | tttctgggttaaggcaatagcaatatttctgcatataaatatttctgcatataaattgtaactgatgtaagaggtttcatattgctaatagcagctacaatccagcta |
| | ccattctgcttttattttctggttgggataaggctggattattctgagtccaagctaggcccttttgctaatcttgttcatacctcttatcttcctcccacagctcctgg |
| | gcaacctgctggtctctctgctggcccatcactttggcaaagcacgcgtgccaccatggcctttctgtggctgctgtcctgctgggccctgctggggaccac |
| | ctttggcaatccaaatgctaccagctccagctcccaggatccagagagtttgcaagacagaggcgaagggaaggtcgcaacaacagttatctccaagatg |
| | ctattcgttgaacccatcctggaggtttccagcttgccgacaaccaactcaacaaccaattcagccaccaaaataacagctaataccactgatgaacccacc |
| | acacaacccaccacagagcccaccacccaacccaccatccaacccacccaaccaactacccagctcccaacagattctcctacccagcccactactggg |
| | tccttctgcccaggacctgttactctctgctctgacttggagagtcattcaacagaggccgtgttgggggatgctttggtagatttctccctgaagctctaccac |
| | gccttctcagcaatgaagaaggtggagaccaacatggccttttccccattcagcatcgccagcctccttacccaggtcctgctcggggctggggagaacac |
| | caaaacaaacctggagagcatcctctcttaccccaaggacttcacctgtgtccaccaggccctgaagggcttcacgaccaaaggtgtcacctcagtctctc |
| | agattttccacagcccagacctggccataagggacacctttgtgaatgcctctcggaccctgtacagcagcagccccagagtcctaagcaacaacagtga |
| | cgccaacttggagctcatcaacacctgggtggccaagaacaccaacaacaagatcagccggctgctagacagtctgccctccgatacccgccttgtcctc |
| | ctcaatgctatctacctgagtgccaagtggaagacaacatttgatcccaagaaaaccagaatggaaccctttcacttcaaaaactcagttataaaagtgccca |
| | tgatgaatagcaagaagtaccctgtggcccatttcattgaccaaactttgaaagccaaggtggggcagctgcagctctcccacaatctgagtttggtgatcct |
| | ggtaccccagaacctgaaacatcgtcttgaagacatggaacaggctctcagcccttctgttttcaaggccatcatggagaaactggagatgtccaagttcca |
| | gcccactctcctaacactaccccgcatcaaagtgacgaccagccaggatatgctctcaatcatggagaaattggaattcttcgatttttcttatgaccttaacct |
| | gtgtgggctgacagaggaccctgatcttcaggtttctgcgatgcagcaccagacagtgctggaactgacagagactggggtggaggcggctgcagcctc |
| | cgccatctctgtggcccgcaccctgctggtctttgaagtgcagcagcccttcctcttcgtgctctgggaccagcagcacaagttccctgtcttcatggggcga |
| | gtatatgaccccagggcctgaagatctagagctgaattcctgcagccagggggatcagcctctactgtgccttctagttgccagccatctgttgtttgcccctc |
| | ccccttgccttccttgaccctggaaggtgccactcccactgtcctttcctaataaaatgaggaaattgcatcacattgtctgagtaggtgtcattctattctgggg |
| | ggtggggggggcaggacagcaagggggaggattgggaagacaatagcaggcatgctggggatgcagtgggctctatggcttctgaggcagaaaga |
| | accagctggggctcgagatccactagggccgcaggaacccctagtgatggagttggccactccctctctgcgcgctcgctcgctcactgaggccgggcg |
| | accaaaggtcgcccgacgcccgggctttgcccgggcggcctcagtgagcgagcgagcgcgcag |
| 3 | ctgcgcgctcgctcgctcactgaggccgcccgggcaaagcccgggcggcctcagtgagcgagcgagcgcgcagagagggagtggccaactccatca |
| | ctaggggttcctgcggcctagtaggctcagaggcacacaggagtttctgggctcaccctgcccccttccaacccctcagttcccatcctccagcagctgttt |
| | gtgtgctgcctctgaagtccacactgaacaaacttcagcctactcatgtccctaaaatgggcaaacattgcaagcagcaaacagcaaacacacagccctcc |
| | ctgcctgctgaccttggagctggggcagaggtcagagacctctctgggcccatgccacctccaacatccactcgaccccttggaatttcggtggagagga |
| | gcagaggttgtcctggcgtggtttaggtagtgtgagaggggtacccggggatcttgctaccagtggaacagccactaaggattctgcagtgagagcagag |
| | ggccagctaagtggtactctcccagagactgtctgactcacgccaccccctccaccttggacacaggacgctgtggtttctgagccaggtacaatgactcct |
| | ttcggtaagtgcagtggaagctgtacactgcccaggcaaagcgtccgggcagcgtaggcgggcgactcagatcccagccagtggacttagcccctgttt |
| | gctcctccgataactggggtgaccttggttaatattcaccagcagcctcccccgttgcccctctggatccactgcttaaatacggacgaggacagggccctg |
| | tctcctcagcttcaggcaccaccactgacctgggacagtgaatagatcctgagaacttcagggtgagtctatgggacccttgatgttttctttccccttcttttct |
| | atggttaagttcatgtcataggaaggggagaagtaacagggtacacatattgaccaaatcagggtaattttgcatttgtaattttaaaaaatgctttcttcttttaat |
| | atacttttttgtttatcttatttctaatactttccctaatctctttctttcagggcaataatgatacaatgtatcatgcctctttgcaccattctaaagaataacagtgataa |
| | tttctgggttaaggcaatagcaatatttctgcatataaatatttctgcatataaattgtaactgatgtaagaggtttcatattgctaatagcagctacaatccagcta |
| | ccattctgcttttattttctggttgggataaggctggattattctgagtccaagctaggcccttttgctaatcttgttcatacctcttatcttcctcccacagctcctgg |
| | gcaacctgctggtctctctgctggcccatcactttggcaaagcacgcgtgccaccatgaagtgggtaacctttatttcccttctttttctctttagctcggcttattc |
| | caatccaaatgctaccagctccagctcccaggatccagagagtttgcaagacagaggcgaagggaaggtcgcaacaacagttatctccaagatgctattc |
| | gttgaacccatcctggaggtttccagcttgccgacaaccaactcaacaaccaattcagccaccaaaataacagctaataccactgatgaacccaccacaca |
| | acccaccacagagcccaccacccaacccaccatccaacccacccaaccaactacccagctcccaacagattctcctacccagcccactactgggtccttc |
| | tgcccaggacctgttactctctgctctgacttggagagtcattcaacagaggccgtgttgggggatgctttggtagatttctccctgaagctctaccacgccttc |
| | tcagcaatgaagaaggtggagaccaacatggccttttccccattcagcatcgccagcctccttacccaggtcctgctcggggctggggagaacaccaaaa |
| | caaacctggagagcatcctctcttaccccaaggacttcacctgtgtccaccaggccctgaagggcttcacgaccaaaggtgtcacctcagtctctcagatttt |
| | ccacagcccagacctggccataagggacacctttgtgaatgcctctcggaccctgtacagcagcagccccagagtcctaagcaacaacagtgacgccaa |
| | cttggagctcatcaacacctgggtggccaagaacaccaacaacaagatcagccggctgctagacagtctgccctccgatacccgccttgtcctcctcaatg |
| | ctatctacctgagtgccaagtggaagacaacatttgatcccaagaaaaccagaatggaaccctttcacttcaaaaactcagttataaaagtgcccatgatgaa |
| | tagcaagaagtaccctgtggcccatttcattgaccaaactttgaaagccaaggtggggcagctgcagctctcccacaatctgagtttggtgatcctggtaccc |
| | cagaacctgaaacatcgtcttgaagacatggaacaggctctcagcccttctgttttcaaggccatcatggagaaactggagatgtccaagttccagcccact |
| | ctcctaacactaccccgcatcaaagtgacgaccagccaggatatgctctcaatcatggagaaattggaattcttcgatttttcttatgaccttaacctgtgtggg |
| | ctgacagaggaccctgatcttcaggtttctgcgatgcagcaccagacagtgctggaactgacagagactggggggaggcggctgcagcctccgccatc |
| | tctgtggcccgcaccctgctggtctttgaagtgcagcagcccttcctcttcgtgctctgggaccagcagcacaagttccctgtcttcatggggcgagtatatg |
| | accccagggcctgaagatctagagctgaattcctgcagccagggggatcagcctctactgtgccttctagttgccagccatctgttgtttgcccctccccctt |
| | gccttccttgaccctggaaggtgccactcccactgtcctttcctaataaaatgaggaaattgcatcacattgtctgagtaggtgtcattctattctggggggtgg |
| | ggtggggcaggacagcaagggggaggattgggaagacaatagcaggcatgctggggatgcagtgggctctatggcttctgaggcagaaagaaccag |
| | ctggggctcgagatccactagggccgcaggaacccctagtgatggagttggccactccctctctgcgcgctcgctcgctcactgaggccgggcgaccaa |
| | aggtcgcccgacgcccgggctttgcccgggcggcctcagtgagcgagcgagcgcgcag |
| 4 | ctgcgcgctcgctcgctcactgaggccgcccgggcaaagcccgggcggcctcagtgagcgagcgagcgcgcagagagggagtggccaactccatca |
| | ctaggggttcctgcggcctagtaggctcagaggcacacaggagtttctgggctcaccctgcccccttccaacccctcagttcccatcctccagcagctgttt |
| | gtgtgctgcctctgaagtccacactgaacaaacttcagcctactcatgtccctaaaatgggcaaacattgcaagcagcaaacagcaaacacacagccctcc |
| | ctgcctgctgaccttggagctggggcagaggtcagagacctctctgggcccatgccacctccaacatccactcgaccccttggaatttcggtggagagga |
| | gcagaggttgtcctggcgtggtttaggtagtgtgagaggggtacccggggatcttgctaccagtggaacagccactaaggattctgcagtgagagcagag |
| | ggccagctaagtggtactctcccagagactgtctgactcacgccaccccctccaccttggacacaggacgctgtggtttctgagccaggtacaatgactcct |
| | ttcggtaagtgcagtggaagctgtacactgcccaggcaaagcgtccgggcagcgtaggcgggcgactcagatcccagccagtggacttagcccctgttt |
| | gctcctccgataactggggtgaccttggttaatattcaccagcagcctcccccgttgcccctctggatccactgcttaaatacggacgaggacagggccctg |
| | tctcctcagcttcaggcaccaccactgacctgggacagtgaatagatcctgagaacttcagggtgagtctatgggacccttgatgttttctttccccttcttttct |
| | atggttaagttcatgtcataggaaggggagaagtaacagggtacacatattgaccaaatcagggtaattttgcatttgtaattttaaaaaatgctttcttcttttaat |
| | atacttttttgtttatcttatttctaatactttccctaatctctttctttcagggcaataatgatacaatgtatcatgcctctttgcaccattctaaagaataacagtgataa |
| | tttctgggttaaggcaatagcaatatttctgcatataaatatttctgcatataaattgtaactgatgtaagaggtttcatattgctaatagcagctacaatccagcta |
| | ccattctgcttttattttctggttgggataaggctggattattctgagtccaagctaggcccttttgctaatcttgttcatacctcttatcttcctcccacagctcctgg |
| | gcaacctgctggtctctctgctggcccatcactttggcaaagcacgcgtgccaccatggcgctgtcctgggttcttacagtcctgagcctcctacctctgctg |
| | gaagccaatccaaatgctaccagctccagctcccaggatccagagagtttgcaagacagaggcgaagggaaggtcgcaacaacagttatctccaagatg |
| | ctattcgttgaacccatcctggaggtttccagcttgccgacaaccaactcaacaaccaattcagccaccaaaataacagctaataccactgatgaacccacc |
| | acacaacccaccacagagcccaccacccaacccaccatccaacccacccaaccaactacccagctcccaacagattctcctacccagcccactactggg |
| | tccttctgcccaggacctgttactctctgctctgacttggagagtcattcaacagaggccgtgttgggggatgctttggtagatttctccctgaagctctaccac |
| | gccttctcagcaatgaagaaggtggagaccaacatggccttttccccattcagcatcgccagcctccttacccaggtcctgctcggggctggggagaacac |
| | caaaacaaacctggagagcatcctctcttaccccaaggacttcacctgtgtccaccaggccctgaagggcttcacgaccaaaggtgtcacctcagtctctc |
| | agattttccacagcccagacctggccataagggacacctttgtgaatgcctctcggaccctgtacagcagcagccccagagtcctaagcaacaacagtga |
| | cgccaacttggagctcatcaacacctgggggccaagaacaccaacaacaagatcagccggctgctagacagtctgccctccgatacccgccttgtcctc |
| | ctcaatgctatctacctgagtgccaagtggaagacaacatttgatcccaagaaaaccagaatggaaccctttcacttcaaaaactcagttataaaagtgccca |
| | tgatgaatagcaagaagtaccctgtggcccatttcattgaccaaactttgaaagccaaggtggggcagctgcagctctcccacaatctgagtttggtgatcct |
| | ggtaccccagaacctgaaacatcgtcttgaagacatggaacaggctctcagcccttctgttttcaaggccatcatggagaaactggagatgtccaagttcca |
| | gcccactctcctaacactaccccgcatcaaagtgacgaccagccaggatatgctctcaatcatggagaaattggaattcttcgatttttcttatgaccttaacct |
| | gtgtgggctgacagaggaccctgatcttcaggtttctgcgatgcagcaccagacagtgctggaactgacagagactggggtggaggcggctgcagcctc |
| | cgccatctctgtggcccgcaccctgctggtctttgaagtgcagcagcccttcctcttcgtgctctgggaccagcagcacaagttccctgtcttcatggggcga |
| | gtatatgaccccagggcctgaagatctagagctgaattcctgcagccagggggatcagcctctactgtgccttctagttgccagccatctgttgtttgcccctc |
| | ccccttgccttccttgaccctggaaggtgccactcccactgtcctttcctaataaaatgaggaaattgcatcacattgtctgagtaggtgtcattctattctgggg |
| | ggtggggggggcaggacagcaagggggaggattgggaagacaatagcaggcatgctggggatgcagtgggctctatggcttctgaggcagaaaga |
| | accagctggggctcgagatccactagggccgcaggaacccctagtgatggagttggccactccctctctgcgcgctcgctcgctcactgaggccgggcg |
| | accaaaggtcgcccgacgcccgggctttgcccgggcggcctcagtgagcgagcgagcgcgcag |
| 5 | ctgcgcgctcgctcgctcactgaggccgcccgggcaaagcccgggcggcctcagtgagcgagcgagcgcgcagagagggagtggccaactccatca |
| | ctaggggttcctgcggcctagtaggctcagaggcacacaggagtttctgggctcaccctgcccccttccaacccctcagttcccatcctccagcagctgttt |
| | gtgtgctgcctctgaagtccacactgaacaaacttcagcctactcatgtccctaaaatgggcaaacattgcaagcagcaaacagcaaacacacagccctcc |
| | ctgcctgctgaccttggagctggggcagaggtcagagacctctctgggcccatgccacctccaacatccactcgaccccttggaatttcggtggagagga |
| | gcagaggttgtcctggcgtggtttaggtagtgtgagaggggtacccggggatcttgctaccagtggaacagccactaaggattctgcagtgagagcagag |
| | ggccagctaagtggtactctcccagagactgtctgactcacgccaccccctccaccttggacacaggacgctgtggtttctgagccaggtacaatgactcct |
| | ttcggtaagtgcagtggaagctgtacactgcccaggcaaagcgtccgggcagcgtaggcgggcgactcagatcccagccagtggacttagcccctgttt |
| | gctcctccgataactggggtgaccttggttaatattcaccagcagcctcccccgttgcccctctggatccactgcttaaatacggacgaggacagggccctg |
| | tctcctcagcttcaggcaccaccactgacctgggacagtgaatagatcctgagaacttcagggtgagtctatgggacccttgatgttttctttccccttcttttct |
| | atggttaagttcatgtcataggaaggggagaagtaacagggtacacatattgaccaaatcagggtaattttgcatttgtaattttaaaaaatgctttcttcttttaat |
| | atacttttttgtttatcttatttctaatactttccctaatctctttctttcagggcaataatgatacaatgtatcatgcctctttgcaccattctaaagaataacagtgataa |
| | tttctgggttaaggcaatagcaatatttctgcatataaatatttctgcatataaattgtaactgatgtaagaggtttcatattgctaatagcagctacaatccagcta |
| | ccattctgcttttattttctggttgggataaggctggattattctgagtccaagctaggcccttttgctaatcttgttcatacctcttatcttcctcccacagctcctgg |
| | gcaacctgctggtctctctgctggcccatcactttggcaaagcacgcgtgccaccatgaggctcgccgtgggagccctgctggtctgcgccgtcctgggg |
| | ctgtgtctggctaatccaaatgctaccagctccagctcccaggatccagagagtttgcaagacagaggcgaagggaaggtcgcaacaacagttatctcca |
| | agatgctattcgttgaacccatcctggaggtttccagcttgccgacaaccaactcaacaaccaattcagccaccaaaataacagctaataccactgatgaac |
| | ccaccacacaacccaccacagagcccaccacccaacccaccatccaacccacccaaccaactacccagctcccaacagattctcctacccagcccacta |
| | ctgggtccttctgcccaggacctgttactctctgctctgacttggagagtcattcaacagaggccgtgttgggggatgctttggtagatttctccctgaagctct |
| | accacgccttctcagcaatgaagaaggtggagaccaacatggccttttccccattcagcatcgccagcctccttacccaggtcctgctcggggctggggag |
| | aacaccaaaacaaacctggagagcatcctctcttaccccaaggacttcacctgtgtccaccaggccctgaagggcttcacgaccaaaggtgtcacctcagt |
| | ctctcagattttccacagcccagacctggccataagggacacctttgtgaatgcctctcggaccctgtacagcagcagccccagagtcctaagcaacaaca |
| | gtgacgccaacttggagctcatcaacacctgggtggccaagaacaccaacaacaagatcagccggctgctagacagtctgccctccgatacccgccttgt |
| | cctcctcaatgctatctacctgagtgccaagtggaagacaacatttgatcccaagaaaaccagaatggaaccctttcacttcaaaaactcagttataaaagtg |
| | cccatgatgaatagcaagaagtaccctgtggcccatttcattgaccaaactttgaaagccaaggtggggcagctgcagctctcccacaatctgagtttggtg |
| | atcctggtaccccagaacctgaaacatcgtcttgaagacatggaacaggctctcagcccttctgttttcaaggccatcatggagaaactggagatgtccaag |
| | ttccagcccactctcctaacactaccccgcatcaaagtgacgaccagccaggatatgctctcaatcatggagaaattggaattcttcgatttttcttatgacctta |
| | acctgtgtgggctgacagaggaccctgatcttcaggtttctgcgatgcagcaccagacagtgctggaactgacagagactggggtggaggcggctgcag |
| | cctccgccatctctgtggcccgcaccctgctggtctttgaagtgcagcagcccttcctcttcgtgctctgggaccagcagcacaagttccctgtcttcatggg |
| | gcgagtatatgaccccagggcctgaagatctagagctgaattcctgcagccagggggatcagcctctactgtgccttctagttgccagccatctgttgtttgc |
| | ccctcccccttgccttccttgaccctggaaggtgccactcccactgtcctttcctaataaaatgaggaaattgcatcacattgtctgagtaggtgtcattctattct |
| | ggggggtggggtggggcaggacagcaagggggaggattgggaagacaatagcaggcatgctggggatgcagtgggctctatggcttctgaggcaga |
| | aagaaccagctggggctcgagatccactagggccgcaggaacccctagtgatggagttggccactccctctctgcgcgctcgctcgctcactgaggccg |
| | ggcgaccaaaggtcgcccgacgcccgggctttgcccgggcggcctcagtgagcgagcgagcgcgcag |
| 6 | ctgcgcgctcgctcgctcactgaggccgcccgggcaaagcccgggcggcctcagtgagcgagcgagcgcgcagagagggagtggccaactccatca |
| | ctaggggttcctgcggcctagtaggctcagaggcacacaggagtttctgggctcaccctgcccccttccaacccctcagttcccatcctccagcagctgttt |
| | gtgtgctgcctctgaagtccacactgaacaaacttcagcctactcatgtccctaaaatgggcaaacattgcaagcagcaaacagcaaacacacagccctcc |
| | ctgcctgctgaccttggagctggggcagaggtcagagacctctctgggcccatgccacctccaacatccactcgaccccttggaatttcggtggagagga |
| | gcagaggttgtcctggcgtggtttaggtagtgtgagaggggtacccggggatcttgctaccagtggaacagccactaaggattctgcagtgagagcagag |
| | ggccagctaagtggtactctcccagagactgtctgactcacgccaccccctccaccttggacacaggacgctgtggtttctgagccaggtacaatgactcct |
| | ttcggtaagtgcagtggaagctgtacactgcccaggcaaagcgtccgggcagcgtaggcgggcgactcagatcccagccagtggacttagcccctgttt |
| | gctcctccgataactggggtgaccttggttaatattcaccagcagcctcccccgttgcccctctggatccactgcttaaatacggacgaggacagggccctg |
| | tctcctcagcttcaggcaccaccactgacctgggacagtgaatagatcctgagaacttcagggtgagtctatgggacccttgatgttttctttccccttcttttct |
| | atggttaagttcatgtcataggaaggggagaagtaacagggtacacatattgaccaaatcagggtaattttgcatttgtaattttaaaaaatgctttcttcttttaat |
| | atacttttttgtttatcttatttctaatactttccctaatctctttctttcagggcaataatgatacaatgtatcatgcctctttgcaccattctaaagaataacagtgataa |
| | tttctgggttaaggcaatagcaatatttctgcatataaatatttctgcatataaattgtaactgatgtaagaggtttcatattgctaatagcagctacaatccagcta |
| | ccattctgcttttattttctggttgggataaggctggattattctgagtccaagctaggcccttttgctaatcttgttcatacctcttatcttcctcccacagctcctgg |
| | gcaacctgctggtctctctgctggcccatcactttggcaaagcacgcgtgccaccatgaggagcctcggggccctgctcttgctgctgagcgcctgcctgg |
| | cggtgagcgctaatccaaatgctaccagctccagctcccaggatccagagagtttgcaagacagaggcgaagggaaggtcgcaacaacagttatctcca |
| | agatgctattcgttgaacccatcctggaggtttccagcttgccgacaaccaactcaacaaccaattcagccaccaaaataacagctaataccactgatgaac |
| | ccaccacacaacccaccacagagcccaccacccaacccaccatccaacccacccaaccaactacccagctcccaacagattctcctacccagcccacta |
| | ctgggtccttctgcccaggacctgttactctctgctctgacttggagagtcattcaacagaggccgtgttgggggatgctttggtagatttctccctgaagctct |
| | accacgccttctcagcaatgaagaaggtggagaccaacatggccttttccccattcagcatcgccagcctccttacccaggtcctgctcggggctggggag |
| | aacaccaaaacaaacctggagagcatcctctcttaccccaaggacttcacctgtgtccaccaggccctgaagggcttcacgaccaaaggtgtcacctcagt |
| | ctctcagattttccacagcccagacctggccataagggacacctttgtgaatgcctctcggaccctgtacagcagcagccccagagtcctaagcaacaaca |
| | gtgacgccaacttggagctcatcaacacctgggtggccaagaacaccaacaacaagatcagccggctgctagacagtctgccctccgatacccgccttgt |
| | cctcctcaatgctatctacctgagtgccaagtggaagacaacatttgatcccaagaaaaccagaatggaaccctttcacttcaaaaactcagttataaaagtg |
| | cccatgatgaatagcaagaagtaccctgtggcccatttcattgaccaaactttgaaagccaaggtggggcagctgcagctctcccacaatctgagtttggtg |
| | atcctggtaccccagaacctgaaacatcgtcttgaagacatggaacaggctctcagcccttctgttttcaaggccatcatggagaaactggagatgtccaag |
| | ttccagcccactctcctaacactaccccgcatcaaagtgacgaccagccaggatatgctctcaatcatggagaaattggaattcttcgatttttcttatgacctta |
| | acctgtgtgggctgacagaggaccctgatcttcaggtttctgcgatgcagcaccagacagtgctggaactgacagagactggggtggaggcggctgcag |
| | cctccgccatctctgtggcccgcaccctgctggtctttgaagtgcagcagcccttcctcttcgtgctctgggaccagcagcacaagttccctgtcttcatggg |
| | gcgagtatatgaccccagggcctgaagatctagagctgaattcctgcagccagggggatcagcctctactgtgccttctagttgccagccatctgttgtttgc |
| | ccctcccccttgccttccttgaccctggaaggtgccactcccactgtcctttcctaataaaatgaggaaattgcatcacattgtctgagtaggtgtcattctattct |
| | ggggggtggggggggcaggacagcaagggggaggattgggaagacaatagcaggcatgctggggatgcagtgggctctatggcttctgaggcaga |
| | aagaaccagctggggctcgagatccactagggccgcaggaacccctagtgatggagttggccactccctctctgcgcgctcgctcgctcactgaggccg |
| | ggcgaccaaaggtcgcccgacgcccgggctttgcccgggcggcctcagtgagcgagcgagcgcgcag |
| 7 | ctgcgcgctcgctcgctcactgaggccgcccgggcaaagcccgggcggcctcagtgagcgagcgagcgcgcagagagggagtggccaactccatca |
| | ctaggggttcctgcggcctagtaggctcagaggcacacaggagtttctgggctcaccctgcccccttccaacccctcagttcccatcctccagcagctgttt |
| | gtgtgctgcctctgaagtccacactgaacaaacttcagcctactcatgtccctaaaatgggcaaacattgcaagcagcaaacagcaaacacacagccctcc |
| | ctgcctgctgaccttggagctggggcagaggtcagagacctctctgggcccatgccacctccaacatccactcgaccccttggaatttcggtggagagga |
| | gcagaggttgtcctggcgtggtttaggtagtgtgagaggggtacccggggatcttgctaccagtggaacagccactaaggattctgcagtgagagcagag |
| | ggccagctaagtggtactctcccagagactgtctgactcacgccaccccctccaccttggacacaggacgctgtggtttctgagccaggtacaatgactcct |
| | ttcggtaagtgcagtggaagctgtacactgcccaggcaaagcgtccgggcagcgtaggcgggcgactcagatcccagccagtggacttagcccctgttt |
| | gctcctccgataactggggtgaccttggttaatattcaccagcagcctcccccgttgcccctctggatccactgcttaaatacggacgaggacagggccctg |
| | tctcctcagcttcaggcaccaccactgacctgggacagtgaatagatcctgagaacttcagggtgagtctatgggacccttgatgttttctttccccttcttttct |
| | atggttaagttcatgtcataggaaggggagaagtaacagggtacacatattgaccaaatcagggtaattttgcatttgtaattttaaaaaatgctttcttcttttaat |
| | atacttttttgtttatcttatttctaatactttccctaatctctttctttcagggcaataatgatacaatgtatcatgcctctttgcaccattctaaagaataacagtgataa |
| | tttctgggttaaggcaatagcaatatttctgcatataaatatttctgcatataaattgtaactgatgtaagaggtttcatattgctaatagcagctacaatccagcta |
| | ccattctgcttttattttctggttgggataaggctggattattctgagtccaagctaggcccttttgctaatcttgttcatacctcttatcttcctcccacagctcctgg |
| | gcaacctgctggtctctctgctggcccatcactttggcaaagcacgcgtgccaccatggcggcccccggcagcgcccggcgacccctgctgctgctactg |
| | ctgttgctgctgctcggcctcatgcattgtgcgtcagcaaatccaaatgctaccagctccagctcccaggatccagagagtttgcaagacagaggcgaagg |
| | gaaggtcgcaacaacagttatctccaagatgctattcgttgaacccatcctggaggtttccagcttgccgacaaccaactcaacaaccaattcagccaccaa |
| | aataacagctaataccactgatgaacccaccacacaacccaccacagagcccaccacccaacccaccatccaacccacccaaccaactacccagctccc |
| | aacagattctcctacccagcccactactgggtccttctgcccaggacctgttactctctgctctgacttggagagtcattcaacagaggccgtgttgggggat |
| | gctttggtagatttctccctgaagctctaccacgccttctcagcaatgaagaaggtggagaccaacatggccttttccccattcagcatcgccagcctccttac |
| | ccaggtcctgctcggggctggggagaacaccaaaacaaacctggagagcatcctctcttaccccaaggacttcacctgtgtccaccaggccctgaaggg |
| | cttcacgaccaaaggtgtcacctcagtctctcagattttccacagcccagacctggccataagggacacctttgtgaatgcctctcggaccctgtacagcag |
| | cagccccagagtcctaagcaacaacagtgacgccaacttggagctcatcaacacctgggggccaagaacaccaacaacaagatcagccggctgctag |
| | acagtctgccctccgatacccgccttgtcctcctcaatgctatctacctgagtgccaagtggaagacaacatttgatcccaagaaaaccagaatggaaccctt |
| | tcacttcaaaaactcagttataaaagtgcccatgatgaatagcaagaagtaccctgtggcccatttcattgaccaaactttgaaagccaaggtggggcagctg |
| | cagctctcccacaatctgagtttggtgatcctggtaccccagaacctgaaacatcgtcttgaagacatggaacaggctctcagcccttctgttttcaaggccat |
| | catggagaaactggagatgtccaagttccagcccactctcctaacactaccccgcatcaaagtgacgaccagccaggatatgctctcaatcatggagaaat |
| | tggaattcttcgatttttcttatgaccttaacctgtgtgggctgacagaggaccctgatcttcaggtttctgcgatgcagcaccagacagtgctggaactgacag |
| | agactggggtggaggcggctgcagcctccgccatctctgtggcccgcaccctgctggtctttgaagtgcagcagcccttcctcttcgtgctctgggaccag |
| | cagcacaagttccctgtcttcatggggcgagtatatgaccccagggcctgaagatctagagctgaattcctgcagccagggggatcagcctctactgtgcc |
| | ttctagttgccagccatctgttgtttgcccctcccccttgccttccttgaccctggaaggtgccactcccactgtcctttcctaataaaatgaggaaattgcatca |
| | cattgtctgagtaggtgtcattctattctggggggtggggggggcaggacagcaagggggaggattgggaagacaatagcaggcatgctggggatgca |
| | gtgggctctatggcttctgaggcagaaagaaccagctggggctcgagatccactagggccgcaggaacccctagtgatggagttggccactccctctctg |
| | cgcgctcgctcgctcactgaggccgggcgaccaaaggtcgcccgacgcccgggctttgcccgggcggcctcagtgagcgagcgagcgcgcag |
| 8 | ctgcgcgctcgctcgctcactgaggccgcccgggcaaagcccgggcggcctcagtgagcgagcgagcgcgcagagagggagtggccaactccatca |
| | ctaggggttcctgcggcctagtaggctcagaggcacacaggagtttctgggctcaccctgcccccttccaacccctcagttcccatcctccagcagctgttt |
| | gtgtgctgcctctgaagtccacactgaacaaacttcagcctactcatgtccctaaaatgggcaaacattgcaagcagcaaacagcaaacacacagccctcc |
| | ctgcctgctgaccttggagctggggcagaggtcagagacctctctgggcccatgccacctccaacatccactcgaccccttggaatttcggtggagagga |
| | gcagaggttgtcctggcgtggtttaggtagtgtgagaggggtacccggggatcttgctaccagtggaacagccactaaggattctgcagtgagagcagag |
| | ggccagctaagtggtactctcccagagactgtctgactcacgccaccccctccaccttggacacaggacgctgtggtttctgagccaggtacaatgactcct |
| | ttcggtaagtgcagtggaagctgtacactgcccaggcaaagcgtccgggcagcgtagggggcgactcagatcccagccagtggacttagcccctgttt |
| | gctcctccgataactggggtgaccttggttaatattcaccagcagcctcccccgttgcccctctggatccactgcttaaatacggacgaggacagggccctg |
| | tctcctcagcttcaggcaccaccactgacctgggacagtgaatagatcctgagaacttcagggtgagtctatgggacccttgatgttttctttccccttcttttct |
| | atggttaagttcatgtcataggaaggggagaagtaacagggtacacatattgaccaaatcagggtaattttgcatttgtaattttaaaaaatgctttcttcttttaat |
| | atacttttttgtttatcttatttctaatactttccctaatctctttctttcagggcaataatgatacaatgtatcatgcctctttgcaccattctaaagaataacagtgataa |
| | tttctgggttaaggcaatagcaatatttctgcatataaatatttctgcatataaattgtaactgatgtaagaggtttcatattgctaatagcagctacaatccagcta |
| | ccattctgcttttattttctggttgggataaggctggattattctgagtccaagctaggcccttttgctaatcttgttcatacctcttatcttcctcccacagctcctgg |
| | gcaacctgctggtctctctgctggcccatcactttggcaaagcacgcgtgccaccatggaaccagctgctgctctgcacttctccctgccagcctccctcctc |
| | ctcctcctgctcctcctccttctcagcctgtgtgcactggtctcagccaatccaaatgctaccagctccagctcccaggatccagagagtttgcaagacagag |
| | gcgaagggaaggtcgcaacaacagttatctccaagatgctattcgttgaacccatcctggaggtttccagcttgccgacaaccaactcaacaaccaattcag |
| | ccaccaaaataacagctaataccactgatgaacccaccacacaacccaccacagagcccaccacccaacccaccatccaacccacccaaccaactacc |
| | cagctcccaacagattctcctacccagcccactactgggtccttctgcccaggacctgttactctctgctctgacttggagagtcattcaacagaggccgtgtt |
| | gggggatgctttggtagatttctccctgaagctctaccacgccttctcagcaatgaagaaggtggagaccaacatggccttttccccattcagcatcgccagc |
| | ctccttacccaggtcctgctcggggctggggagaacaccaaaacaaacctggagagcatcctctcttaccccaaggacttcacctgtgtccaccaggccct |
| | gaagggcttcacgaccaaaggtgtcacctcagtctctcagattttccacagcccagacctggccataagggacacctttgtgaatgcctctcggaccctgta |
| | cagcagcagccccagagtcctaagcaacaacagtgacgccaacttggagctcatcaacacctgggggccaagaacaccaacaacaagatcagccgg |
| | ctgctagacagtctgccctccgatacccgccttgtcctcctcaatgctatctacctgagtgccaagtggaagacaacatttgatcccaagaaaaccagaatg |
| | gaaccctttcacttcaaaaactcagttataaaagtgcccatgatgaatagcaagaagtaccctgtggcccatttcattgaccaaactttgaaagccaaggtgg |
| | ggcagctgcagctctcccacaatctgagtttggtgatcctggtaccccagaacctgaaacatcgtcttgaagacatggaacaggctctcagcccttctgttttc |
| | aaggccatcatggagaaactggagatgtccaagttccagcccactctcctaacactaccccgcatcaaagtgacgaccagccaggatatgctctcaatcat |
| | ggagaaattggaattcttcgatttttcttatgaccttaacctgtgtgggctgacagaggaccctgatcttcaggtttctgcgatgcagcaccagacagtgctgg |
| | aactgacagagactggggtggaggcggctgcagcctccgccatctctgtggcccgcaccctgctggtctttgaagtgcagcagcccttcctcttcgtgctct |
| | gggaccagcagcacaagttccctgtcttcatggggcgagtatatgaccccagggcctgaagatctagagctgaattcctgcagccagggggatcagcctc |
| | tactgtgccttctagttgccagccatctgttgtttgcccctcccccttgccttccttgaccctggaaggtgccactcccactgtcctttcctaataaaatgaggaa |
| | attgcatcacattgtctgagtaggtgtcattctattctggggggtggggggggcaggacagcaagggggaggattgggaagacaatagcaggcatgctg |
| | gggatgcagtgggctctatggcttctgaggcagaaagaaccagctggggctcgagatccactagggccgcaggaacccctagtgatggagttggccact |
| | ccctctctgcgcgctcgctcgctcactgaggccgggcgaccaaaggtcgcccgacgcccgggctttgcccgggcggcctcagtgagcgagcgagcgc |
| | gcag |
| 9 | ctgcgcgctcgctcgctcactgaggccgcccgggcaaagcccgggcggcctcagtgagcgagcgagcgcgcagagagggagtggccaactccatca |
| | ctaggggttcctgcggcctagtaggctcagaggcacacaggagtttctgggctcaccctgcccccttccaacccctcagttcccatcctccagcagctgttt |
| | gtgtgctgcctctgaagtccacactgaacaaacttcagcctactcatgtccctaaaatgggcaaacattgcaagcagcaaacagcaaacacacagccctcc |
| | ctgcctgctgaccttggagctggggcagaggtcagagacctctctgggcccatgccacctccaacatccactcgaccccttggaatttcggtggagagga |
| | gcagaggttgtcctggcgtggtttaggtagtgtgagaggggtacccggggatcttgctaccagtggaacagccactaaggattctgcagtgagagcagag |
| | ggccagctaagtggtactctcccagagactgtctgactcacgccaccccctccaccttggacacaggacgctgtggtttctgagccaggtacaatgactcct |
| | ttcggtaagtgcagtggaagctgtacactgcccaggcaaagcgtccgggcagcgtaggcgggcgactcagatcccagccagtggacttagcccctgttt |
| | gctcctccgataactggggtgaccttggttaatattcaccagcagcctcccccgttgcccctctggatccactgcttaaatacggacgaggacagggccctg |
| | tctcctcagcttcaggcaccaccactgacctgggacagtgaatagatcctgagaacttcagggtgagtctatgggacccttgatgtttttttccccttcttttct |
| | atggttaagttcatgtcataggaaggggagaagtaacagggtacacatattgaccaaatcagggtaattttgcatttgtaattttaaaaaatgctttcttcttttaat |
| | atacttttttgtttatcttatttctaatactttccctaatctctttctttcagggcaataatgatacaatgtatcatgcctctttgcaccattctaaagaataacagtgataa |
| | tttctgggttaaggcaatagcaatatttctgcatataaatatttctgcatataaattgtaactgatgtaagaggtttcatattgctaatagcagctacaatccagcta |
| | ccattctgcttttattttctggttgggataaggctggattattctgagtccaagctaggcccttttgctaatcttgttcatacctcttatcttcctcccacagctcctgg |
| | gcaacctgctggtctctctgctggcccatcactttggcaaagcacgcgtgccaccatgtggctgccttgggctctgttgcttctctgggtcccaggatgttttg |
| | ctaatccaaatgctaccagctccagctcccaggatccagagagtttgcaagacagaggcgaagggaaggtcgcaacaacagttatctccaagatgctattc |
| | gttgaacccatcctggaggtttccagcttgccgacaaccaactcaacaaccaattcagccaccaaaataacagctaataccactgatgaacccaccacaca |
| | acccaccacagagcccaccacccaacccaccatccaacccacccaaccaactacccagctcccaacagattctcctacccagcccactactgggtccttc |
| | tgcccaggacctgttactctctgctctgacttggagagtcattcaacagaggccgtgttgggggatgctttggtagatttctccctgaagctctaccacgccttc |
| | tcagcaatgaagaaggtggagaccaacatggccttttccccattcagcatcgccagcctccttacccaggtcctgctcggggctggggagaacaccaaaa |
| | caaacctggagagcatcctctcttaccccaaggacttcacctgtgtccaccaggccctgaagggcttcacgaccaaaggtgtcacctcagtctctcagatttt |
| | ccacagcccagacctggccataagggacacctttgtgaatgcctctcggaccctgtacagcagcagccccagagtcctaagcaacaacagtgacgccaa |
| | cttggagctcatcaacacctgggtggccaagaacaccaacaacaagatcagccggctgctagacagtctgccctccgatacccgccttgtcctcctcaatg |
| | ctatctacctgagtgccaagtggaagacaacatttgatcccaagaaaaccagaatggaaccctttcacttcaaaaactcagttataaaagtgcccatgatgaa |
| | tagcaagaagtaccctgtggcccatttcattgaccaaactttgaaagccaaggtggggcagctgcagctctcccacaatctgagtttggtgatcctggtaccc |
| | cagaacctgaaacatcgtcttgaagacatggaacaggctctcagcccttctgttttcaaggccatcatggagaaactggagatgtccaagttccagcccact |
| | ctcctaacactaccccgcatcaaagtgacgaccagccaggatatgctctcaatcatggagaaattggaattcttcgatttttcttatgaccttaacctgtgtggg |
| | ctgacagaggaccctgatcttcaggtttctgcgatgcagcaccagacagtgctggaactgacagagactggggtggaggcggctgcagcctccgccatc |
| | tctgtggcccgcaccctgctggtctttgaagtgcagcagcccttcctcttcgtgctctgggaccagcagcacaagttccctgtcttcatggggcgagtatatg |
| | accccagggcctgaagatctagagctgaattcctgcagccagggggatcagcctctactgtgccttctagttgccagccatctgttgtttgcccctccccctt |
| | gccttccttgaccctggaaggtgccactcccactgtcctttcctaataaaatgaggaaattgcatcacattgtctgagtaggtgtcattctattctggggggtgg |
| | ggtggggcaggacagcaagggggaggattgggaagacaatagcaggcatgctggggatgcagtgggctctatggcttctgaggcagaaagaaccag |
| | ctggggctcgagatccactagggccgcaggaacccctagtgatggagttggccactccctctctgcgcgctcgctcgctcactgaggccgggcgaccaa |
| | aggtcgcccgacgcccgggctttgcccgggcggcctcagtgagcgagcgagcgcgcag |
| 10 | ctgcgcgctcgctcgctcactgaggccgcccgggcaaagcccgggcggcctcagtgagcgagcgagcgcgcagagagggagtggccaactccatca |
| | ctaggggttcctgcggcctagtaggctcagaggcacacaggagtttctgggctcaccctgcccccttccaacccctcagttcccatcctccagcagctgttt |
| | gtgtgctgcctctgaagtccacactgaacaaacttcagcctactcatgtccctaaaatgggcaaacattgcaagcagcaaacagcaaacacacagccctcc |
| | ctgcctgctgaccttggagctggggcagaggtcagagacctctctgggcccatgccacctccaacatccactcgaccccttggaatttcggtggagagga |
| | gcagaggttgtcctggcgtggtttaggtagtgtgagaggggtacccggggatcttgctaccagtggaacagccactaaggattctgcagtgagagcagag |
| | ggccagctaagtggtactctcccagagactgtctgactcacgccaccccctccaccttggacacaggacgctgtggtttctgagccaggtacaatgactcct |
| | ttcggtaagtgcagtggaagctgtacactgcccaggcaaagcgtccgggcagcgtaggcgggcgactcagatcccagccagtggacttagcccctgttt |
| | gctcctccgataactggggtgaccttggttaatattcaccagcagcctcccccgttgcccctctggatccactgcttaaatacggacgaggacagggccctg |
| | tctcctcagcttcaggcaccaccactgacctgggacagtgaatagatcctgagaacttcagggtgagtctatgggacccttgatgttttctttccccttcttttct |
| | atggttaagttcatgtcataggaaggggagaagtaacagggtacacatattgaccaaatcagggtaattttgcatttgtaattttaaaaaatgctttcttcttttaat |
| | atacttttttgtttatcttatttctaatactttccctaatctctttctttcagggcaataatgatacaatgtatcatgcctctttgcaccattctaaagaataacagtgataa |
| | tttctgggttaaggcaatagcaatatttctgcatataaatatttctgcatataaattgtaactgatgtaagaggtttcatattgctaatagcagctacaatccagcta |
| | ccattctgcttttattttctggttgggataaggctggattattctgagtccaagctaggcccttttgctaatcttgttcatacctcttatcttcctcccacagctcctgg |
| | gcaacctgctggtctctctgctggcccatcactttggcaaagcacgcgtgccaccatgcccgccctgcgccccgctctgctgtgggcgctgctggcgctct |
| | ggctgtgctgcgcggcccccgcgcatgcaaatccaaatgctaccagctccagctcccaggatccagagagtttgcaagacagaggcgaagggaaggtc |
| | gcaacaacagttatctccaagatgctattcgttgaacccatcctggaggtttccagcttgccgacaaccaactcaacaaccaattcagccaccaaaataaca |
| | gctaataccactgatgaacccaccacacaacccaccacagagcccaccacccaacccaccatccaacccacccaaccaactacccagctcccaacaga |
| | ttctcctacccagcccactactgggtccttctgcccaggacctgttactctctgctctgacttggagagtcattcaacagaggccgtgttgggggatgctttggt |
| | agatttctccctgaagctctaccacgccttctcagcaatgaagaaggtggagaccaacatggccttttccccattcagcatcgccagcctccttacccaggtc |
| | ctgctcggggctggggagaacaccaaaacaaacctggagagcatcctctcttaccccaaggacttcacctgtgtccaccaggccctgaagggcttcacga |
| | ccaaaggtgtcacctcagtctctcagattttccacagcccagacctggccataagggacacctttgtgaatgcctctcggaccctgtacagcagcagcccca |
| | gagtcctaagcaacaacagtgacgccaacttggagctcatcaacacctgggtggccaagaacaccaacaacaagatcagccggctgctagacagtctgc |
| | cctccgatacccgccttgtcctcctcaatgctatctacctgagtgccaagtggaagacaacatttgatcccaagaaaaccagaatggaaccctttcacttcaa |
| | aaactcagttataaaagtgcccatgatgaatagcaagaagtaccctgtggcccatttcattgaccaaactttgaaagccaaggtggggcagctgcagctctc |
| | ccacaatctgagtttggtgatcctggtaccccagaacctgaaacatcgtcttgaagacatggaacaggctctcagcccttctgttttcaaggccatcatggag |
| | aaactggagatgtccaagttccagcccactctcctaacactaccccgcatcaaagtgacgaccagccaggatatgctctcaatcatggagaaattggaattc |
| | ttcgatttttcttatgaccttaacctgtgtgggctgacagaggaccctgatcttcaggtttctgcgatgcagcaccagacagtgctggaactgacagagactgg |
| | ggtggaggcggctgcagcctccgccatctctgtggcccgcaccctgctggtctttgaagtgcagcagcccttcctcttcgtgctctgggaccagcagcaca |
| | agttccctgtcttcatggggcgagtatatgaccccagggcctgaagatctagagctgaattcctgcagccagggggatcagcctctactgtgccttctagttg |
| | ccagccatctgttgtttgcccctcccccttgccttccttgaccctggaaggtgccactcccactgtcctttcctaataaaatgaggaaattgcatcacattgtctg |
| | agtaggtgtcattctattctggggggtggggggggcaggacagcaagggggaggattgggaagacaatagcaggcatgctggggatgcagtgggctc |
| | tatggcttctgaggcagaaagaaccagctggggctcgagatccactagggccgcaggaacccctagtgatggagttggccactccctctctgcgcgctcg |
| | ctcgctcactgaggccgggcgaccaaaggtcgcccgacgcccgggctttgcccgggcggcctcagtgagcgagcgagcgcgcag |
| 11 | ctgcgcgctcgctcgctcactgaggccgcccgggcaaagcccgggcggcctcagtgagcgagcgagcgcgcagagagggagtggccaactccatca |
| | ctaggggttcctgcggcctagtaggctcagaggcacacaggagtttctgggctcaccctgcccccttccaacccctcagttcccatcctccagcagctgttt |
| | gtgtgctgcctctgaagtccacactgaacaaacttcagcctactcatgtccctaaaatgggcaaacattgcaagcagcaaacagcaaacacacagccctcc |
| | ctgcctgctgaccttggagctggggcagaggtcagagacctctctgggcccatgccacctccaacatccactcgaccccttggaatttcggtggagagga |
| | gcagaggttgtcctggcgtggtttaggtagtgtgagaggggtacccggggatcttgctaccagtggaacagccactaaggattctgcagtgagagcagag |
| | ggccagctaagtggtactctcccagagactgtctgactcacgccaccccctccaccttggacacaggacgctgtggtttctgagccaggtacaatgactcct |
| | ttcggtaagtgcagtggaagctgtacactgcccaggcaaagcgtccgggcagcgtaggcgggcgactcagatcccagccagtggacttagcccctgttt |
| | gctcctccgataactggggtgaccttggttaatattcaccagcagcctcccccgttgcccctctggatccactgcttaaatacggacgaggacagggccctg |
| | tctcctcagcttcaggcaccaccactgacctgggacagtgaatagatcctgagaacttcagggtgagtctatgggacccttgatgtttttttccccttcttttct |
| | atggttaagttcatgtcataggaaggggagaagtaacagggtacacatattgaccaaatcagggtaattttgcatttgtaattttaaaaaatgctttcttcttttaat |
| | atacttttttgtttatcttatttctaatactttccctaatctctttctttcagggcaataatgatacaatgtatcatgcctctttgcaccattctaaagaataacagtgataa |
| | tttctgggttaaggcaatagcaatatttctgcatataaatatttctgcatataaattgtaactgatgtaagaggtttcatattgctaatagcagctacaatccagcta |
| | ccattctgcttttattttctggttgggataaggctggattattctgagtccaagctaggcccttttgctaatcttgttcatacctcttatcttcctcccacagctcctgg |
| | gcaacctgctggtctctctgctggcccatcactttggcaaagcacgcgtgccaccatggctctcagcctctggcccctgctgctgctgctgctgctgctgctg |
| | ctgctgtcctttgcaaatccaaatgctaccagctccagctcccaggatccagagagtttgcaagacagaggcgaagggaaggtcgcaacaacagttatctc |
| | caagatgctattcgttgaacccatcctggaggtttccagcttgccgacaaccaactcaacaaccaattcagccaccaaaataacagctaataccactgatga |
| | acccaccacacaacccaccacagagcccaccacccaacccaccatccaacccacccaaccaactacccagctcccaacagattctcctacccagccca |
| | ctactgggtccttctgcccaggacctgttactctctgctctgacttggagagtcattcaacagaggccgtgttgggggatgctttggtagatttctccctgaagc |
| | tctaccacgccttctcagcaatgaagaaggtggagaccaacatggccttttccccattcagcatcgccagcctccttacccaggtcctgctcggggctggg |
| | gagaacaccaaaacaaacctggagagcatcctctcttaccccaaggacttcacctgtgtccaccaggccctgaagggcttcacgaccaaaggtgtcacct |
| | cagtctctcagattttccacagcccagacctggccataagggacacctttgtgaatgcctctcggaccctgtacagcagcagccccagagtcctaagcaac |
| | aacagtgacgccaacttggagctcatcaacacctgggtggccaagaacaccaacaacaagatcagccggctgctagacagtctgccctccgatacccgc |
| | cttgtcctcctcaatgctatctacctgagtgccaagtggaagacaacatttgatcccaagaaaaccagaatggaaccctttcacttcaaaaactcagttataaa |
| | agtgcccatgatgaatagcaagaagtaccctgtggcccatttcattgaccaaactttgaaagccaaggtggggcagctgcagctctcccacaatctgagttt |
| | ggtgatcctggtaccccagaacctgaaacatcgtcttgaagacatggaacaggctctcagcccttctgttttcaaggccatcatggagaaactggagatgtc |
| | caagttccagcccactctcctaacactaccccgcatcaaagtgacgaccagccaggatatgctctcaatcatggagaaattggaattcttcgatttttcttatga |
| | ccttaacctgtgtgggctgacagaggaccctgatcttcaggtttctgcgatgcagcaccagacagtgctggaactgacagagactggggtggaggcggct |
| | gcagcctccgccatctctgtggcccgcaccctgctggtctttgaagtgcagcagcccttcctcttcgtgctctgggaccagcagcacaagttccctgtcttca |
| | tggggcgagtatatgaccccagggcctgaagatctagagctgaattcctgcagccagggggatcagcctctactgtgccttctagttgccagccatctgttg |
| | tttgcccctcccccttgccttccttgaccctggaaggtgccactcccactgtcctttcctaataaaatgaggaaattgcatcacattgtctgagtaggtgtcattct |
| | attctggggggtggggtggggcaggacagcaagggggaggattgggaagacaatagcaggcatgctggggatgcagtgggctctatggcttctgagg |
| | cagaaagaaccagctggggctcgagatccactagggccgcaggaacccctagtgatggagttggccactccctctctgcgcgctcgctcgctcactgag |
| | gccgggcgaccaaaggtcgcccgacgcccgggctttgcccgggcggcctcagtgagcgagcgagcgcgcag |
| 12 | ctgcgcgctcgctcgctcactgaggccgcccgggcaaagcccgggcggcctcagtgagcgagcgagcgcgcagagagggagtggccaactccatca |
| | ctaggggttcctgcggcctagtaggctcagaggcacacaggagtttctgggctcaccctgcccccttccaacccctcagttcccatcctccagcagctgttt |
| | gtgtgctgcctctgaagtccacactgaacaaacttcagcctactcatgtccctaaaatgggcaaacattgcaagcagcaaacagcaaacacacagccctcc |
| | ctgcctgctgaccttggagctggggcagaggtcagagacctctctgggcccatgccacctccaacatccactcgaccccttggaatttcggtggagagga |
| | gcagaggttgtcctggcgtggtttaggtagtgtgagaggggtacccggggatcttgctaccagtggaacagccactaaggattctgcagtgagagcagag |
| | ggccagctaagtggtactctcccagagactgtctgactcacgccaccccctccaccttggacacaggacgctgtggtttctgagccaggtacaatgactcct |
| | ttcggtaagtgcagtggaagctgtacactgcccaggcaaagcgtccgggcagcgtaggcgggcgactcagatcccagccagtggacttagcccctgttt |
| | gctcctccgataactggggtgaccttggttaatattcaccagcagcctcccccgttgcccctctggatccactgcttaaatacggacgaggacagggccctg |
| | tctcctcagcttcaggcaccaccactgacctgggacagtgaatagatcctgagaacttcagggtgagtctatgggacccttgatgttttctttccccttcttttct |
| | atggttaagttcatgtcataggaaggggagaagtaacagggtacacatattgaccaaatcagggtaattttgcatttgtaattttaaaaaatgctttcttcttttaat |
| | atacttttttgtttatcttatttctaatactttccctaatctctttctttcagggcaataatgatacaatgtatcatgcctctttgcaccattctaaagaataacagtgataa |
| | tttctgggttaaggcaatagcaatatttctgcatataaatatttctgcatataaattgtaactgatgtaagaggtttcatattgctaatagcagctacaatccagcta |
| | ccattctgcttttattttctggttgggataaggctggattattctgagtccaagctaggcccttttgctaatcttgttcatacctcttatcttcctcccacagctcctgg |
| | gcaacctgctggtctctctgctggcccatcactttggcaaagcacgcgtgccaccatgaagtccctcgtcctgctcctttgtcttgctcagctctggggctgcc |
| | actcaaatccaaatgctaccagctccagctcccaggatccagagagtttgcaagacagaggcgaagggaaggtcgcaacaacagttatctccaagatgct |
| | attcgttgaacccatcctggaggtttccagcttgccgacaaccaactcaacaaccaattcagccaccaaaataacagctaataccactgatgaacccaccac |
| | acaacccaccacagagcccaccacccaacccaccatccaacccacccaaccaactacccagctcccaacagattctcctacccagcccactactgggtc |
| | cttctgcccaggacctgttactctctgctctgacttggagagtcattcaacagaggccgtgttgggggatgctttggtagatttctccctgaagctctaccacgc |
| | cttctcagcaatgaagaaggtggagaccaacatggccttttccccattcagcatcgccagcctccttacccaggtcctgctcggggctggggagaacacca |
| | aaacaaacctggagagcatcctctcttaccccaaggacttcacctgtgtccaccaggccctgaagggcttcacgaccaaaggtgtcacctcagtctctcag |
| | attttccacagcccagacctggccataagggacacctttgtgaatgcctctcggaccctgtacagcagcagccccagagtcctaagcaacaacagtgacg |
| | ccaacttggagctcatcaacacctgggtggccaagaacaccaacaacaagatcagccggctgctagacagtctgccctccgatacccgccttgtcctcctc |
| | aatgctatctacctgagtgccaagtggaagacaacatttgatcccaagaaaaccagaatggaaccctttcacttcaaaaactcagttataaaagtgcccatga |
| | tgaatagcaagaagtaccctgtggcccatttcattgaccaaactttgaaagccaaggtggggcagctgcagctctcccacaatctgagtttggtgatcctggt |
| | accccagaacctgaaacatcgtcttgaagacatggaacaggctctcagcccttctgttttcaaggccatcatggagaaactggagatgtccaagttccagcc |
| | cactctcctaacactaccccgcatcaaagtgacgaccagccaggatatgctctcaatcatggagaaattggaattcttcgatttttcttatgaccttaacctgtgt |
| | gggctgacagaggaccctgatcttcaggtttctgcgatgcagcaccagacagtgctggaactgacagagactggggggaggcggctgcagcctccgc |
| | catctctgtggcccgcaccctgctggtctttgaagtgcagcagcccttcctcttcgtgctctgggaccagcagcacaagttccctgtcttcatggggcgagta |
| | tatgaccccagggcctgaagatctagagctgaattcctgcagccagggggatcagcctctactgtgccttctagttgccagccatctgttgtttgcccctccc |
| | ccttgccttccttgaccctggaaggtgccactcccactgtcctttcctaataaaatgaggaaattgcatcacattgtctgagtaggtgtcattctattctgggggg |
| | tggggtggggcaggacagcaagggggaggattgggaagacaatagcaggcatgctggggatgcagtgggctctatggcttctgaggcagaaagaacc |
| | agctggggctcgagatccactagggccgcaggaacccctagtgatggagttggccactccctctctgcgcgctcgctcgctcactgaggccgggcgacc |
| | aaaggtcgcccgacgcccgggctttgcccgggcggcctcagtgagcgagcgagcgcgcag |
| 13 | ctgcgcgctcgctcgctcactgaggccgcccgggcaaagcccgggcggcctcagtgagcgagcgagcgcgcagagagggagtggccaactccatca |
| | ctaggggttcctgcggcctagtaggctcagaggcacacaggagtttctgggctcaccctgcccccttccaacccctcagttcccatcctccagcagctgttt |
| | gtgtgctgcctctgaagtccacactgaacaaacttcagcctactcatgtccctaaaatgggcaaacattgcaagcagcaaacagcaaacacacagccctcc |
| | ctgcctgctgaccttggagctggggcagaggtcagagacctctctgggcccatgccacctccaacatccactcgaccccttggaatttcggtggagagga |
| | gcagaggttgtcctggcgtggtttaggtagtgtgagaggggtacccggggatcttgctaccagtggaacagccactaaggattctgcagtgagagcagag |
| | ggccagctaagtggtactctcccagagactgtctgactcacgccaccccctccaccttggacacaggacgctgtggtttctgagccaggtacaatgactcct |
| | ttcggtaagtgcagtggaagctgtacactgcccaggcaaagcgtccgggcagcgtaggcgggcgactcagatcccagccagtggacttagcccctgttt |
| | gctcctccgataactggggtgaccttggttaatattcaccagcagcctcccccgttgcccctctggatccactgcttaaatacggacgaggacagggccctg |
| | tctcctcagcttcaggcaccaccactgacctgggacagtgaatagatcctgagaacttcagggtgagtctatgggacccttgatgttttctttccccttcttttct |
| | atggttaagttcatgtcataggaaggggagaagtaacagggtacacatattgaccaaatcagggtaattttgcatttgtaattttaaaaaatgctttcttcttttaat |
| | atacttttttgtttatcttatttctaatactttccctaatctctttctttcagggcaataatgatacaatgtatcatgcctctttgcaccattctaaagaataacagtgataa |
| | tttctgggttaaggcaatagcaatatttctgcatataaatatttctgcatataaattgtaactgatgtaagaggtttcatattgctaatagcagctacaatccagcta |
| | ccattctgcttttattttctggttgggataaggctggattattctgagtccaagctaggcccttttgctaatcttgttcatacctcttatcttcctcccacagctcctgg |
| | gcaacctgctggtctctctgctggcccatcactttggcaaagcacgcgtgccaccatgaagttcgccctggtggccgccctggccctgctgctgttcctgtg |
| | gagcagctgcagggccaatccaaatgctaccagctccagctcccaggatccagagagtttgcaagacagaggcgaagggaaggtcgcaacaacagtta |
| | tctccaagatgctattcgttgaacccatcctggaggtttccagcttgccgacaaccaactcaacaaccaattcagccaccaaaataacagctaataccactga |
| | tgaacccaccacacaacccaccacagagcccaccacccaacccaccatccaacccacccaaccaactacccagctcccaacagattctcctacccagcc |
| | cactactgggtccttctgcccaggacctgttactctctgctctgacttggagagtcattcaacagaggccgtgttgggggatgctttggtagatttctccctgaa |
| | gctctaccacgccttctcagcaatgaagaaggtggagaccaacatggccttttccccattcagcatcgccagcctccttacccaggtcctgctcggggctgg |
| | ggagaacaccaaaacaaacctggagagcatcctctcttaccccaaggacttcacctgtgtccaccaggccctgaagggcttcacgaccaaaggtgtcacc |
| | tcagtctctcagattttccacagcccagacctggccataagggacacctttgtgaatgcctctcggaccctgtacagcagcagccccagagtcctaagcaac |
| | aacagtgacgccaacttggagctcatcaacacctgggggccaagaacaccaacaacaagatcagccggctgctagacagtctgccctccgatacccgc |
| | cttgtcctcctcaatgctatctacctgagtgccaagtggaagacaacatttgatcccaagaaaaccagaatggaaccctttcacttcaaaaactcagttataaa |
| | agtgcccatgatgaatagcaagaagtaccctgtggcccatttcattgaccaaactttgaaagccaaggtggggcagctgcagctctcccacaatctgagttt |
| | ggtgatcctggtaccccagaacctgaaacatcgtcttgaagacatggaacaggctctcagcccttctgttttcaaggccatcatggagaaactggagatgtc |
| | caagttccagcccactctcctaacactaccccgcatcaaagtgacgaccagccaggatatgctctcaatcatggagaaattggaattcttcgatttttcttatga |
| | ccttaacctgtgtgggctgacagaggaccctgatcttcaggtttctgcgatgcagcaccagacagtgctggaactgacagagactggggtggaggcggct |
| | gcagcctccgccatctctgtggcccgcaccctgctggtctttgaagtgcagcagcccttcctcttcgtgctctgggaccagcagcacaagttccctgtcttca |
| | tggggcgagtatatgaccccagggcctgaagatctagagctgaattcctgcagccagggggatcagcctctactgtgccttctagttgccagccatctgttg |
| | tttgcccctcccccttgccttccttgaccctggaaggtgccactcccactgtcctttcctaataaaatgaggaaattgcatcacattgtctgagtaggtgtcattct |
| | attctggggggtggggggggcaggacagcaagggggaggattgggaagacaatagcaggcatgctggggatgcagtgggctctatggcttctgagg |
| | cagaaagaaccagctggggctcgagatccactagggccgcaggaacccctagtgatggagttggccactccctctctgcgcgctcgctcgctcactgag |
| | gccgggcgaccaaaggtcgcccgacgcccgggctttgcccgggcggcctcagtgagcgagcgagcgcgcag |
| 14 | ctgcgcgctcgctcgctcactgaggccgcccgggcaaagcccgggcggcctcagtgagcgagcgagcgcgcagagagggagtggccaactccatca |
| | ctaggggttcctgcggcctagtaggctcagaggcacacaggagtttctgggctcaccctgcccccttccaacccctcagttcccatcctccagcagctgttt |
| | gtgtgctgcctctgaagtccacactgaacaaacttcagcctactcatgtccctaaaatgggcaaacattgcaagcagcaaacagcaaacacacagccctcc |
| | ctgcctgctgaccttggagctggggcagaggtcagagacctctctgggcccatgccacctccaacatccactcgaccccttggaatttcggtggagagga |
| | gcagaggttgtcctggcgtggtttaggtagtgtgagaggggtacccggggatcttgctaccagtggaacagccactaaggattctgcagtgagagcagag |
| | ggccagctaagtggtactctcccagagactgtctgactcacgccaccccctccaccttggacacaggacgctgtggtttctgagccaggtacaatgactcct |
| | ttcggtaagtgcagtggaagctgtacactgcccaggcaaagcgtccgggcagcgtagggggcgactcagatcccagccagtggacttagcccctgttt |
| | gctcctccgataactggggtgaccttggttaatattcaccagcagcctcccccgttgcccctctggatccactgcttaaatacggacgaggacagggccctg |
| | tctcctcagcttcaggcaccaccactgacctgggacagtgaatagatcctgagaacttcagggtgagtctatgggacccttgatgttttctttccccttcttttct |
| | atggttaagttcatgtcataggaaggggagaagtaacagggtacacatattgaccaaatcagggtaattttgcatttgtaattttaaaaaatgctttcttcttttaat |
| | atacttttttgtttatcttatttctaatactttccctaatctcttttttcagggcaataatgatacaatgtatcatgcctctttgcaccattctaaagaataacagtgataa |
| | tttctgggttaaggcaatagcaatatttctgcatataaatatttctgcatataaattgtaactgatgtaagaggtttcatattgctaatagcagctacaatccagcta |
| | ccattctgcttttattttctggttgggataaggctggattattctgagtccaagctaggcccttttgctaatcttgttcatacctcttatcttcctcccacagctcctgg |
| | gcaacctgctggtctctctgctggcccatcactttggcaaagcacgcgtgccaccatgaagttcgccctggtggccgccctggccctgctgctgttcctgtg |
| | gggctgccacagcaatccaaatgctaccagctccagctcccaggatccagagagtttgcaagacagaggcgaagggaaggtcgcaacaacagttatctc |
| | caagatgctattcgttgaacccatcctggaggtttccagcttgccgacaaccaactcaacaaccaattcagccaccaaaataacagctaataccactgatga |
| | acccaccacacaacccaccacagagcccaccacccaacccaccatccaacccacccaaccaactacccagctcccaacagattctcctacccagccca |
| | ctactgggtccttctgcccaggacctgttactctctgctctgacttggagagtcattcaacagaggccgtgttgggggatgctttggtagatttctccctgaagc |
| | tctaccacgccttctcagcaatgaagaaggtggagaccaacatggccttttccccattcagcatcgccagcctccttacccaggtcctgctcggggctggg |
| | gagaacaccaaaacaaacctggagagcatcctctcttaccccaaggacttcacctgtgtccaccaggccctgaagggcttcacgaccaaaggtgtcacct |
| | cagtctctcagattttccacagcccagacctggccataagggacacctttgtgaatgcctctcggaccctgtacagcagcagccccagagtcctaagcaac |
| | aacagtgacgccaacttggagctcatcaacacctgggtggccaagaacaccaacaacaagatcagccggctgctagacagtctgccctccgatacccgc |
| | cttgtcctcctcaatgctatctacctgagtgccaagtggaagacaacatttgatcccaagaaaaccagaatggaaccctttcacttcaaaaactcagttataaa |
| | agtgcccatgatgaatagcaagaagtaccctgtggcccatttcattgaccaaactttgaaagccaaggtggggcagctgcagctctcccacaatctgagttt |
| | ggtgatcctggtaccccagaacctgaaacatcgtcttgaagacatggaacaggctctcagcccttctgttttcaaggccatcatggagaaactggagatgtc |
| | caagttccagcccactctcctaacactaccccgcatcaaagtgacgaccagccaggatatgctctcaatcatggagaaattggaattcttcgatttttcttatga |
| | ccttaacctgtgtgggctgacagaggaccctgatcttcaggtttctgcgatgcagcaccagacagtgctggaactgacagagactggggtggaggcggct |
| | gcagcctccgccatctctgtggcccgcaccctgctggtctttgaagtgcagcagcccttcctcttcgtgctctgggaccagcagcacaagttccctgtcttca |
| | tggggcgagtatatgaccccagggcctgaagatctagagctgaattcctgcagccagggggatcagcctctactgtgccttctagttgccagccatctgttg |
| | tttgcccctcccccttgccttccttgaccctggaaggtgccactcccactgtcctttcctaataaaatgaggaaattgcatcacattgtctgagtaggtgtcattct |
| | attctggggggggggtggggcaggacagcaagggggaggattgggaagacaatagcaggcatgctggggatgcagtgggctctatggcttctgagg |
| | cagaaagaaccagctggggctcgagatccactagggccgcaggaacccctagtgatggagttggccactccctctctgcgcgctcgctcgctcactgag |
| | gccgggcgaccaaaggtcgcccgacgcccgggctttgcccgggcggcctcagtgagcgagcgagcgcgcag |
| 15 | ctgcgcgctcgctcgctcactgaggccgcccgggcaaagcccgggcggcctcagtgagcgagcgagcgcgcagagagggagtggccaactccatca |
| | ctaggggttcctgcggcctagtaggctcagaggcacacaggagtttctgggctcaccctgcccccttccaacccctcagttcccatcctccagcagctgttt |
| | gtgtgctgcctctgaagtccacactgaacaaacttcagcctactcatgtccctaaaatgggcaaacattgcaagcagcaaacagcaaacacacagccctcc |
| | ctgcctgctgaccttggagctggggcagaggtcagagacctctctgggcccatgccacctccaacatccactcgaccccttggaatttcggtggagagga |
| | gcagaggttgtcctggcgtggtttaggtagtgtgagaggggtacccggggatcttgctaccagtggaacagccactaaggattctgcagtgagagcagag |
| | ggccagctaagtggtactctcccagagactgtctgactcacgccaccccctccaccttggacacaggacgctgtggtttctgagccaggtacaatgactcct |
| | ttcggtaagtgcagtggaagctgtacactgcccaggcaaagcgtccgggcagcgtaggcgggcgactcagatcccagccagtggacttagcccctgttt |
| | gctcctccgataactggggtgaccttggttaatattcaccagcagcctcccccgttgcccctctggatccactgcttaaatacggacgaggacagggccctg |
| | tctcctcagcttcaggcaccaccactgacctgggacagtgaatagatcctgagaacttcagggtgagtctatgggacccttgatgtttttttccccttcttttct |
| | atggttaagttcatgtcataggaaggggagaagtaacagggtacacatattgaccaaatcagggtaattttgcatttgtaattttaaaaaatgctttcttcttttaat |
| | atacttttttgtttatcttatttctaatactttccctaatctctttctttcagggcaataatgatacaatgtatcatgcctctttgcaccattctaaagaataacagtgataa |
| | tttctgggttaaggcaatagcaatatttctgcatataaatatttctgcatataaattgtaactgatgtaagaggtttcatattgctaatagcagctacaatccagcta |
| | ccattctgcttttattttctggttgggataaggctggattattctgagtccaagctaggcccttttgctaatcttgttcatacctcttatcttcctcccacagctcctgg |
| | gcaacctgctggtctctctgctggcccatcactttggcaaagcacgcgtgccaccatgaagtgggtgaccctgctgaccctgctgctgctgctgctgttcctg |
| | tggggctgccacagcaatccaaatgctaccagctccagctcccaggatccagagagtttgcaagacagaggcgaagggaaggtcgcaacaacagttatc |
| | tccaagatgctattcgttgaacccatcctggaggtttccagcttgccgacaaccaactcaacaaccaattcagccaccaaaataacagctaataccactgatg |
| | aacccaccacacaacccaccacagagcccaccacccaacccaccatccaacccacccaaccaactacccagctcccaacagattctcctacccagccc |
| | actactgggtccttctgcccaggacctgttactctctgctctgacttggagagtcattcaacagaggccgtgttgggggatgctttggtagatttctccctgaag |
| | ctctaccacgccttctcagcaatgaagaaggtggagaccaacatggccttttccccattcagcatcgccagcctccttacccaggtcctgctcggggctggg |
| | gagaacaccaaaacaaacctggagagcatcctctcttaccccaaggacttcacctgtgtccaccaggccctgaagggcttcacgaccaaaggtgtcacct |
| | cagtctctcagattttccacagcccagacctggccataagggacacctttgtgaatgcctctcggaccctgtacagcagcagccccagagtcctaagcaac |
| | aacagtgacgccaacttggagctcatcaacacctgggggccaagaacaccaacaacaagatcagccggctgctagacagtctgccctccgatacccgc |
| | cttgtcctcctcaatgctatctacctgagtgccaagtggaagacaacatttgatcccaagaaaaccagaatggaaccctttcacttcaaaaactcagttataaa |
| | agtgcccatgatgaatagcaagaagtaccctgtggcccatttcattgaccaaactttgaaagccaaggtggggcagctgcagctctcccacaatctgagttt |
| | ggtgatcctggtaccccagaacctgaaacatcgtcttgaagacatggaacaggctctcagcccttctgttttcaaggccatcatggagaaactggagatgtc |
| | caagttccagcccactctcctaacactaccccgcatcaaagtgacgaccagccaggatatgctctcaatcatggagaaattggaattcttcgatttttcttatga |
| | ccttaacctgtgtgggctgacagaggaccctgatcttcaggtttctgcgatgcagcaccagacagtgctggaactgacagagactggggtggaggcggct |
| | gcagcctccgccatctctgtggcccgcaccctgctggtctttgaagtgcagcagcccttcctcttcgtgctctgggaccagcagcacaagttccctgtcttca |
| | tggggcgagtatatgaccccagggcctgaagatctagagctgaattcctgcagccagggggatcagcctctactgtgccttctagttgccagccatctgttg |
| | tttgcccctcccccttgccttccttgaccctggaaggtgccactcccactgtcctttcctaataaaatgaggaaattgcatcacattgtctgagtaggtgtcattct |
| | attctggggggtggggtggggcaggacagcaagggggaggattgggaagacaatagcaggcatgctggggatgcagtgggctctatggcttctgagg |
| | cagaaagaaccagctggggctcgagatccactagggccgcaggaacccctagtgatggagttggccactccctctctgcgcgctcgctcgctcactgag |
| | gccgggcgaccaaaggtcgcccgacgcccgggctttgcccgggcggcctcagtgagcgagcgagcgcgcag |
| 16 | ctgcgcgctcgctcgctcactgaggccgcccgggcaaagcccgggcggcctcagtgagcgagcgagcgcgcagagagggagtggccaactccatca |
| | ctaggggttcctgcggcctagtaggctcagaggcacacaggagtttctgggctcaccctgcccccttccaacccctcagttcccatcctccagcagctgttt |
| | gtgtgctgcctctgaagtccacactgaacaaacttcagcctactcatgtccctaaaatgggcaaacattgcaagcagcaaacagcaaacacacagccctcc |
| | ctgcctgctgaccttggagctggggcagaggtcagagacctctctgggcccatgccacctccaacatccactcgaccccttggaatttcggtggagagga |
| | gcagaggttgtcctggcgtggtttaggtagtgtgagaggggtacccggggatcttgctaccagtggaacagccactaaggattctgcagtgagagcagag |
| | ggccagctaagtggtactctcccagagactgtctgactcacgccaccccctccaccttggacacaggacgctgtggtttctgagccaggtacaatgactcct |
| | ttcggtaagtgcagtggaagctgtacactgcccaggcaaagcgtccgggcagcgtaggcgggcgactcagatcccagccagtggacttagcccctgttt |
| | gctcctccgataactggggtgaccttggttaatattcaccagcagcctcccccgttgcccctctggatccactgcttaaatacggacgaggacagggccctg |
| | tctcctcagcttcaggcaccaccactgacctgggacagtgaatagatcctgagaacttcagggtgagtctatgggacccttgatgttttctttccccttcttttct |
| | atggttaagttcatgtcataggaaggggagaagtaacagggtacacatattgaccaaatcagggtaattttgcatttgtaattttaaaaaatgctttcttcttttaat |
| | atacttttttgtttatcttatttctaatactttccctaatctctttctttcagggcaataatgatacaatgtatcatgcctctttgcaccattctaaagaataacagtgataa |
| | tttctgggttaaggcaatagcaatatttctgcatataaatatttctgcatataaattgtaactgatgtaagaggtttcatattgctaatagcagctacaatccagcta |
| | ccattctgcttttattttctggttgggataaggctggattattctgagtccaagctaggcccttttgctaatcttgttcatacctcttatcttcctcccacagctcctgg |
| | gcaacctgctggtctctctgctggcccatcactttggcaaagcacgcgtgccaccatgaagtgggtgaccctgctgaccctgctgctgctgctgctgttcctg |
| | tggagcagctgcagggccaatccaaatgctaccagctccagctcccaggatccagagagtttgcaagacagaggcgaagggaaggtcgcaacaacagt |
| | tatctccaagatgctattcgttgaacccatcctggaggtttccagcttgccgacaaccaactcaacaaccaattcagccaccaaaataacagctaataccact |
| | gatgaacccaccacacaacccaccacagagcccaccacccaacccaccatccaacccacccaaccaactacccagctcccaacagattctcctaccca |
| | gcccactactgggtccttctgcccaggacctgttactctctgctctgacttggagagtcattcaacagaggccgtgttgggggatgctttggtagatttctccct |
| | gaagctctaccacgccttctcagcaatgaagaaggtggagaccaacatggccttttccccattcagcatcgccagcctccttacccaggtcctgctcgggg |
| | ctggggagaacaccaaaacaaacctggagagcatcctctcttaccccaaggacttcacctgtgtccaccaggccctgaagggcttcacgaccaaaggtgt |
| | cacctcagtctctcagattttccacagcccagacctggccataagggacacctttgtgaatgcctctcggaccctgtacagcagcagccccagagtcctaag |
| | caacaacagtgacgccaacttggagctcatcaacacctgggggccaagaacaccaacaacaagatcagccggctgctagacagtctgccctccgatac |
| | ccgccttgtcctcctcaatgctatctacctgagtgccaagtggaagacaacatttgatcccaagaaaaccagaatggaaccctttcacttcaaaaactcagtta |
| | taaaagtgcccatgatgaatagcaagaagtaccctgtggcccatttcattgaccaaactttgaaagccaaggtggggcagctgcagctctcccacaatctga |
| | gtttggtgatcctggtaccccagaacctgaaacatcgtcttgaagacatggaacaggctctcagcccttctgttttcaaggccatcatggagaaactggagat |
| | gtccaagttccagcccactctcctaacactaccccgcatcaaagtgacgaccagccaggatatgctctcaatcatggagaaattggaattcttcgatttttctta |
| | tgaccttaacctgtgtgggctgacagaggaccctgatcttcaggtttctgcgatgcagcaccagacagtgctggaactgacagagactggggtggaggcg |
| | gctgcagcctccgccatctctgtggcccgcaccctgctggtctttgaagtgcagcagcccttcctcttcgtgctctgggaccagcagcacaagttccctgtct |
| | tcatggggcgagtatatgaccccagggcctgaagatctagagctgaattcctgcagccagggggatcagcctctactgtgccttctagttgccagccatctg |
| | ttgtttgcccctcccccttgccttccttgaccctggaaggtgccactcccactgtcctttcctaataaaatgaggaaattgcatcacattgtctgagtaggtgtcat |
| | tctattctggggggtggggtggggcaggacagcaagggggaggattgggaagacaatagcaggcatgctggggatgcagtgggctctatggcttctga |
| | ggcagaaagaaccagctggggctcgagatccactagggccgcaggaacccctagtgatggagttggccactccctctctgcgcgctcgctcgctcactg |
| | aggccgggcgaccaaaggtcgcccgacgcccgggctttgcccgggcggcctcagtgagcgagcgagcgcgcag |
| 17 | ctgcgcgctcgctcgctcactgaggccgcccgggcaaagcccgggcggcctcagtgagcgagcgagcgcgcagagagggagtggccaactccatca |
| | ctaggggttcctgcggcctagtaggctcagaggcacacaggagtttctgggctcaccctgcccccttccaacccctcagttcccatcctccagcagctgttt |
| | gtgtgctgcctctgaagtccacactgaacaaacttcagcctactcatgtccctaaaatgggcaaacattgcaagcagcaaacagcaaacacacagccctcc |
| | ctgcctgctgaccttggagctggggcagaggtcagagacctctctgggcccatgccacctccaacatccactcgaccccttggaatttcggtggagagga |
| | gcagaggttgtcctggcgtggtttaggtagtgtgagaggggtacccggggatcttgctaccagtggaacagccactaaggattctgcagtgagagcagag |
| | ggccagctaagtggtactctcccagagactgtctgactcacgccaccccctccaccttggacacaggacgctgtggtttctgagccaggtacaatgactcct |
| | ttcggtaagtgcagtggaagctgtacactgcccaggcaaagcgtccgggcagcgtaggcgggcgactcagatcccagccagtggacttagcccctgttt |
| | gctcctccgataactggggtgaccttggttaatattcaccagcagcctcccccgttgcccctctggatccactgcttaaatacggacgaggacagggccctg |
| | tctcctcagcttcaggcaccaccactgacctgggacagtgaatagatcctgagaacttcagggtgagtctatgggacccttgatgttttctttccccttcttttct |
| | atggttaagttcatgtcataggaaggggagaagtaacagggtacacatattgaccaaatcagggtaattttgcatttgtaattttaaaaaatgctttcttcttttaat |
| | atacttttttgtttatcttatttctaatactttccctaatctcttttttcagggcaataatgatacaatgtatcatgcctctttgcaccattctaaagaataacagtgataa |
| | tttctgggttaaggcaatagcaatatttctgcatataaatatttctgcatataaattgtaactgatgtaagaggtttcatattgctaatagcagctacaatccagcta |
| | ccattctgcttttattttctggttgggataaggctggattattctgagtccaagctaggcccttttgctaatcttgttcatacctcttatcttcctcccacagctcctgg |
| | gcaacctgctggtctctctgctggcccatcactttggcaaagcacgcgtgccaccatggctagcagactgactctgctgaccctgctgctgctgctgctggc |
| | tggggacagggccagcagcaaccctaatgctacctctagctctagccaggaccctgagagcctgcaggataggggggagggcaaggtggccaccact |
| | gtgatcagcaagatgctgtttgtggagcctatcctggaggtgagcagcctgcccaccaccaactctactaccaactctgctaccaagatcactgccaatacc |
| | actgatgaacccaccactcagcccactactgagcccaccacccagcccaccattcagcccactcagcccactacccagctgcctactgactctcccaccc |
| | agcccaccactggcagcttttgtcctggccctgtgaccctgtgctctgacctggagagccattctactgaggctgtgctgggggatgccctggtggacttca |
| | gcctgaagctgtaccatgccttctctgccatgaagaaggtggagaccaacatggccttcagccccttctctattgcctctctgctgacccaggtgctgctggg |
| | ggctggggagaatactaagaccaacctggagagcattctgagctatcccaaggacttcacctgtgtgcaccaggccctgaaggggttcactactaaaggg |
| | gtgacctctgtgtctcagatcttccacagccctgacctggccatcagggacacttttgtgaatgccagcaggaccctgtacagcagcagccccagagtgct |
| | gagcaataattctgatgctaatctggagctgattaacacttgggtggccaagaacaccaacaacaagatctctaggctgctggattctctgccctctgacacc |
| | aggctggtgctgctgaatgccatctatctgtctgccaagtggaagaccacctttgatcccaagaagaccaggatggagcccttccatttcaagaactctgtga |
| | ttaaagtgcccatgatgaactctaagaagtatcctgtggcccacttcattgatcagactctgaaggccaaggtggggcagctgcagctgagccacaacctg |
| | agcctggtgatcctggtgccccagaatctgaagcacaggctggaggacatggagcaggccctgagcccctctgtgttcaaggccatcatggagaagctg |
| | gagatgagcaagttccagcccaccctgctgactctgcccagaattaaggtgaccaccagccaggacatgctgagcatcatggagaagctggagttctttg |
| | acttctcttatgacctgaacctgtgtggcctgactgaggatcctgacctgcaggtgtctgccatgcagcaccagactgtgctggagctgactgagactgggg |
| | tggaggctgctgctgcctctgccatttctgtggccaggaccctgctggtgtttgaggtgcagcagcccttcctgtttgtgctgtgggaccagcagcacaagtt |
| | tcctgtgtttatgggcagggtgtatgaccctagggcctgaagatctagagctgaattcctgcagccagggggatcagcctctactgtgccttctagttgccag |
| | ccatctgttgtttgcccctcccccttgccttccttgaccctggaaggtgccactcccactgtcctttcctaataaaatgaggaaattgcatcacattgtctgagta |
| | ggtgtcattctattctggggggtggggggggcaggacagcaagggggaggattgggaagacaatagcaggcatgctggggatgcagtgggctctatg |
| | gcttctgaggcagaaagaaccagctggggctcgagatccactagggccgcaggaacccctagtgatggagttggccactccctctctgcgcgctcgctc |
| | gctcactgaggccgggcgaccaaaggtcgcccgacgcccgggctttgcccgggcggcctcagtgagcgagcgagcgcgcag |
| 18 | ctgcgcgctcgctcgctcactgaggccgcccgggcaaagcccgggcggcctcagtgagcgagcgagcgcgcagagagggagtggccaactccatca |
| | ctaggggttcctgcggcctagtaggctcagaggcacacaggagtttctgggctcaccctgcccccttccaacccctcagttcccatcctccagcagctgttt |
| | gtgtgctgcctctgaagtccacactgaacaaacttcagcctactcatgtccctaaaatgggcaaacattgcaagcagcaaacagcaaacacacagccctcc |
| | ctgcctgctgaccttggagctggggcagaggtcagagacctctctgggcccatgccacctccaacatccactcgaccccttggaatttcggtggagagga |
| | gcagaggttgtcctggcgtggtttaggtagtgtgagaggggtacccggggatcttgctaccagtggaacagccactaaggattctgcagtgagagcagag |
| | ggccagctaagtggtactctcccagagactgtctgactcacgccaccccctccaccttggacacaggacgctgtggtttctgagccaggtacaatgactcct |
| | ttcggtaagtgcagtggaagctgtacactgcccaggcaaagcgtccgggcagcgtaggcgggcgactcagatcccagccagtggacttagcccctgttt |
| | gctcctccgataactggggtgaccttggttaatattcaccagcagcctcccccgttgcccctctggatccactgcttaaatacggacgaggacagggccctg |
| | tctcctcagcttcaggcaccaccactgacctgggacagtgaatagatcctgagaacttcagggtgagtctatgggacccttgatgttttctttccccttcttttct |
| | atggttaagttcatgtcataggaaggggagaagtaacagggtacacatattgaccaaatcagggtaattttgcatttgtaattttaaaaaatgctttcttcttttaat |
| | atacttttttgtttatcttatttctaatactttccctaatctctttctttcagggcaataatgatacaatgtatcatgcctctttgcaccattctaaagaataacagtgataa |
| | tttctgggttaaggcaatagcaatatttctgcatataaatatttctgcatataaattgtaactgatgtaagaggtttcatattgctaatagcagctacaatccagcta |
| | ccattctgcttttattttctggttgggataaggctggattattctgagtccaagctaggcccttttgctaatcttgttcatacctcttatcttcctcccacagctcctgg |
| | gcaacctgctggtctctctgctggcccatcactttggcaaagcacgcgtgccaccatggccagcaggctgaccctgctgactctgctgctgctgctgctgg |
| | ctggggacagggccagcagcaaccctaatgccacctccagcagcagccaggaccctgagagcctgcaggataggggggagggcaaggtggctacta |
| | ctgtgatcagcaagatgctgtttgtggagcctatcctggaggtgagcagcctgcccaccactaactctactactaattctgccactaagatcactgccaatac |
| | cactgatgagccaaccactcagcccaccactgagcccaccacccagcccaccattcagcccactcagcctaccacccagctgcctactgacagccccac |
| | tcagcccactactggctctttctgtcctgggcctgtgactctgtgctctgacctggaatcccacagcactgaggctgtgctgggggatgccctggtggatttc |
| | agcctgaagctgtaccatgctttctctgccatgaagaaggtggagaccaacatggccttcagccctttctctattgccagcctgctgactcaggtgctgctgg |
| | gggctggggagaataccaagaccaacctggagtctatcctgagctatcccaaggacttcacttgtgtgcaccaggccctgaaggggttcaccaccaagg |
| | gggtgacctctgtgtctcagatctttcacagccctgacctggccatcagggatacctttgtgaatgccagcaggaccctgtacagcagcagccccagggtg |
| | ctgagcaacaactctgatgccaacctggagctgatcaacacctgggtggccaagaacaccaacaacaagatcagcaggctgctggacagcctgccctct |
| | gataccaggctggtgctgctgaatgccatctacctgtctgctaagtggaagaccacttttgatcctaagaagaccaggatggagccctttcacttcaagaact |
| | ctgtgatcaaggtgcccatgatgaactctaagaaataccctgtggcccacttcattgatcagaccctgaaggccaaggtgggccagctgcagctgagccac |
| | aacctgagcttggtgatcctggtgcctcagaacctgaagcacaggctggaggacatggagcaggccctgagcccctctgtgttcaaggccattatggaga |
| | agctggagatgagcaagttccagcctaccctgctgaccctgcccaggatcaaggtgactactagccaggatatgctgagcatcatggagaagctggagttt |
| | tttgatttcagctatgacctgaacctgtgtggcctgactgaggaccctgacctgcaggtgtctgccatgcagcatcagactgtgctggagctgactgagactg |
| | gggtggaggctgctgctgcctctgccatctctgtggccaggaccctgctggtgtttgaggtgcagcagcctttcctgtttgtgctgtgggatcagcagcaca |
| | agtttcctgtgttcatgggcagggtgtatgaccccagggcttgaagatctagagctgaattcctgcagccagggggatcagcctctactgtgccttctagttg |
| | ccagccatctgttgtttgcccctcccccttgccttccttgaccctggaaggtgccactcccactgtcctttcctaataaaatgaggaaattgcatcacattgtctg |
| | agtaggtgtcattctattctggggggtggggggggcaggacagcaagggggaggattgggaagacaatagcaggcatgctggggatgcagtgggctc |
| | tatggcttctgaggcagaaagaaccagctggggctcgagatccactagggccgcaggaacccctagtgatggagttggccactccctctctgcgcgctcg |
| | ctcgctcactgaggccgggcgaccaaaggtcgcccgacgcccgggctttgcccgggcggcctcagtgagcgagcgagcgcgcag |
| 19 | ctgcgcgctcgctcgctcactgaggccgcccgggcaaagcccgggcggcctcagtgagcgagcgagcgcgcagagagggagtggccaactccatca |
| | ctaggggttcctgcggcctagtaggctcagaggcacacaggagtttctgggctcaccctgcccccttccaacccctcagttcccatcctccagcagctgttt |
| | gtgtgctgcctctgaagtccacactgaacaaacttcagcctactcatgtccctaaaatgggcaaacattgcaagcagcaaacagcaaacacacagccctcc |
| | ctgcctgctgaccttggagctggggcagaggtcagagacctctctgggcccatgccacctccaacatccactcgaccccttggaatttcggtggagagga |
| | gcagaggttgtcctggcgtggtttaggtagtgtgagaggggtacccggggatcttgctaccagtggaacagccactaaggattctgcagtgagagcagag |
| | ggccagctaagtggtactctcccagagactgtctgactcacgccaccccctccaccttggacacaggacgctgtggtttctgagccaggtacaatgactcct |
| | ttcggtaagtgcagtggaagctgtacactgcccaggcaaagcgtccgggcagcgtaggcgggcgactcagatcccagccagtggacttagcccctgttt |
| | gctcctccgataactggggtgaccttggttaatattcaccagcagcctcccccgttgcccctctggatccactgcttaaatacggacgaggacagggccctg |
| | tctcctcagcttcaggcaccaccactgacctgggacagtgaatagatcctgagaacttcagggtgagtctatgggacccttgatgttttctttccccttcttttct |
| | atggttaagttcatgtcataggaaggggagaagtaacagggtacacatattgaccaaatcagggtaattttgcatttgtaattttaaaaaatgctttcttcttttaat |
| | atacttttttgtttatcttatttctaatactttccctaatctctttctttcagggcaataatgatacaatgtatcatgcctctttgcaccattctaaagaataacagtgataa |
| | tttctgggttaaggcaatagcaatatttctgcatataaatatttctgcatataaattgtaactgatgtaagaggtttcatattgctaatagcagctacaatccagcta |
| | ccattctgcttttattttctggttgggataaggctggattattctgagtccaagctaggcccttttgctaatcttgttcatacctcttatcttcctcccacagctcctgg |
| | gcaacctgctggtctctctgctggcccatcactttggcaaagcacgcgtgccaccatggctagcagactgactctgctgaccctgctgctgctgctgctggc |
| | tggggacagggccagcagcaaccctaatgctacctctagctctagccaggaccctgagagcctgcaggataggggggagggcaaggtggccaccact |
| | gtgatcagcaagatgctgtttgtggagcctatcctggaggtgagcagcctgcccaccaccaactctactaccaactctgctaccaagatcactgccaatacc |
| | actgatgaacccaccactcagcccactactgagcccaccacccagcccaccattcagcccactcagcccactacccagctgcctactgactctcccaccc |
| | agcccaccactgggagcttctgtccaggccctgtgactctgtgttctgacctggagagccacagcactgaagctgtgctgggggatgctctggtggacttc |
| | agcctgaagctgtaccatgccttctctgccatgaagaaggtggaaaccaacatggcctttagccccttcagcattgctagcctgctgactcaggtgctgctg |
| | ggggctggggagaacactaagactaacctggagtctatcctgtcttatcccaaggacttcacctgtgtgcatcaggccctgaaggggttcaccaccaaggg |
| | ggtcacctctgtgagccagatctttcacagccctgatctggccatcagggacacctttgtgaatgcctctaggactctgtacagcagcagccccagggtgct |
| | gagcaacaactctgatgccaacctggagctgatcaacacctgggtggccaagaacactaacaacaagatcagcaggctgctggacagcctgccctctga |
| | cactaggctggtgctgctgaatgccatctatctgtctgccaagtggaagaccacctttgaccccaagaagactaggatggagccctttcattttaagaactct |
| | gtgatcaaggtgcccatgatgaacagcaagaaataccctgtggcccatttcattgaccagactctgaaggctaaggtgggccagctgcagctgagccaca |
| | acctgagcctggtgatcctggtgccacagaatctgaagcacaggctggaggacatggagcaggctctgtctccctctgtgttcaaggccatcatggagaa |
| | gctggagatgtctaagttccagcccaccctgctgaccctgcccaggatcaaggtgaccacttctcaggacatgctgtctatcatggagaagctggagtttttt |
| | gacttttcttatgacctgaacctgtgtggcctgactgaggaccctgatctgcaggtgtctgccatgcagcaccagactgtgctggagctgactgagactggg |
| | gtggaggctgctgctgcttctgccatttctgtggctaggactctgctggtgtttgaggtgcagcagcccttcctgtttgtgctgtgggaccagcagcacaagtt |
| | ccctgtgttcatgggcagggtgtatgatcccagggcttgaagatctagagctgaattcctgcagccagggggatcagcctctactgtgccttctagttgccag |
| | ccatctgttgtttgcccctcccccttgccttccttgaccctggaaggtgccactcccactgtcctttcctaataaaatgaggaaattgcatcacattgtctgagta |
| | ggtgtcattctattctggggggtggggggggcaggacagcaagggggaggattgggaagacaatagcaggcatgctggggatgcagtgggctctatg |
| | gcttctgaggcagaaagaaccagctggggctcgagatccactagggccgcaggaacccctagtgatggagttggccactccctctctgcgcgctcgctc |
| | gctcactgaggccgggcgaccaaaggtcgcccgacgcccgggctttgcccgggcggcctcagtgagcgagcgagcgcgcag |
| 20 | ctgcgcgctcgctcgctcactgaggccgcccgggcaaagcccgggcggcctcagtgagcgagcgagcgcgcagagagggagtggccaactccatca |
| | ctaggggttcctgcggcctagtaggctcagaggcacacaggagtttctgggctcaccctgcccccttccaacccctcagttcccatcctccagcagctgttt |
| | gtgtgctgcctctgaagtccacactgaacaaacttcagcctactcatgtccctaaaatgggcaaacattgcaagcagcaaacagcaaacacacagccctcc |
| | ctgcctgctgaccttggagctggggcagaggtcagagacctctctgggcccatgccacctccaacatccactcgaccccttggaatttcggtggagagga |
| | gcagaggttgtcctggcgtggtttaggtagtgtgagaggggtacccggggatcttgctaccagtggaacagccactaaggattctgcagtgagagcagag |
| | ggccagctaagtggtactctcccagagactgtctgactcacgccaccccctccaccttggacacaggacgctgtggtttctgagccaggtacaatgactcct |
| | ttcggtaagtgcagtggaagctgtacactgcccaggcaaagcgtccgggcagcgtaggcgggcgactcagatcccagccagtggacttagcccctgttt |
| | gctcctccgataactggggtgaccttggttaatattcaccagcagcctcccccgttgcccctctggatccactgcttaaatacggacgaggacagggccctg |
| | tctcctcagcttcaggcaccaccactgacctgggacagtgaatagatcctgagaacttcagggtgagtctatgggacccttgatgttttctttccccttcttttct |
| | atggttaagttcatgtcataggaaggggagaagtaacagggtacacatattgaccaaatcagggtaattttgcatttgtaattttaaaaaatgctttcttcttttaat |
| | atacttttttgtttatcttatttctaatactttccctaatctctttctttcagggcaataatgatacaatgtatcatgcctctttgcaccattctaaagaataacagtgataa |
| | tttctgggttaaggcaatagcaatatttctgcatataaatatttctgcatataaattgtaactgatgtaagaggtttcatattgctaatagcagctacaatccagcta |
| | ccattctgcttttattttctggttgggataaggctggattattctgagtccaagctaggcccttttgctaatcttgttcatacctcttatcttcctcccacagctcctgg |
| | gcaacctgctggtctctctgctggcccatcactttggcaaagcacgcgtgccaccatggctagcagactgactctgctgaccctgctgctgctgctgctggc |
| | tggggacagggccagcagcaaccctaatgctacctctagctctagccaggaccctgagagcctgcaggataggggggagggcaaggtggccaccact |
| | gtgatcagcaagatgctgtttgtggagcctatcctggaggtgagcagcctgcccaccaccaactctactaccaactctgctaccaagatcactgccaatacc |
| | actgatgaacccaccactcagcccactactgagcccaccacccagcccaccattcagcccactcagcccactacccagctgcctactgactctcccaccc |
| | agcccaccactggcagcttctgccctgggcctgtgaccctgtgctctgacctggagagccattctactgaggctgtgctgggggatgccctggtggatttca |
| | gcctgaagctgtaccatgccttctctgccatgaagaaggtggagaccaacatggccttctctcccttcagcattgccagcctgctgacccaggtgctgctgg |
| | gggctggggagaacaccaagaccaacctggagagcatcctgtcttaccccaaggacttcacctgtgtgcatcaggccctgaagggcttcactactaaggg |
| | ggtgacctctgtgtctcagattttccacagccctgacctggctattagggacacttttgtgaatgcttctaggaccctgtacagcagctctcccagggtgctga |
| | gcaacaactctgatgccaacctggagctgattaacacttgggtggccaagaacactaacaataagatcagcaggctgctggacagcctgccctctgacac |
| | caggctggtgctgctgaatgccatctacctgtctgccaagtggaagactacttttgatcctaagaagaccaggatggagcctttccacttcaagaactctgtg |
| | atcaaggtgcccatgatgaattctaagaagtaccctgtggctcacttcattgaccagaccctgaaggccaaggtgggccagctgcagctgagccacaacct |
| | gagcctggtgattctggtgccccagaacctgaagcacaggctggaggacatggagcaggccctgagcccctctgtgttcaaggccatcatggagaagct |
| | ggagatgagcaagttccagcctactctgctgactctgcccaggatcaaggtgaccactagccaggacatgctgagcattatggagaagctggagttctttg |
| | acttttcttatgatctgaacctgtgtggcctgactgaggaccctgacctgcaggtgtctgccatgcagcaccagactgtgctggagctgactgagactggggt |
| | ggaggctgctgctgcctctgccatctctgtggctaggaccctgctggtgtttgaggtgcagcagcccttcctgtttgtgctgtgggaccagcagcacaagttc |
| | cctgtcttcatgggcagggtgtatgatcccagggcttgaagatctagagctgaattcctgcagccagggggatcagcctctactgtgccttctagttgccagc |
| | catctgttgtttgcccctcccccttgccttccttgaccctggaaggtgccactcccactgtcctttcctaataaaatgaggaaattgcatcacattgtctgagtag |
| | gtgtcattctattctggggggtggggggggcaggacagcaagggggaggattgggaagacaatagcaggcatgctggggatgcagtgggctctatgg |
| | cttctgaggcagaaagaaccagctggggctcgagatccactagggccgcaggaacccctagtgatggagttggccactccctctctgcgcgctcgctcg |
| | ctcactgaggccgggcgaccaaaggtcgcccgacgcccgggctttgcccgggcggcctcagtgagcgagcgagcgcgcag |
| 21 | ctgcgcgctcgctcgctcactgaggccgcccgggcaaagcccgggcggcctcagtgagcgagcgagcgcgcagagagggagtggccaactccatca |
| | ctaggggttcctgcggcctagtaggctcagaggcacacaggagtttctgggctcaccctgcccccttccaacccctcagttcccatcctccagcagctgttt |
| | gtgtgctgcctctgaagtccacactgaacaaacttcagcctactcatgtccctaaaatgggcaaacattgcaagcagcaaacagcaaacacacagccctcc |
| | ctgcctgctgaccttggagctggggcagaggtcagagacctctctgggcccatgccacctccaacatccactcgaccccttggaatttcggtggagagga |
| | gcagaggttgtcctggcgtggtttaggtagtgtgagaggggtacccggggatcttgctaccagtggaacagccactaaggattctgcagtgagagcagag |
| | ggccagctaagtggtactctcccagagactgtctgactcacgccaccccctccaccttggacacaggacgctgtggtttctgagccaggtacaatgactcct |
| | ttcggtaagtgcagtggaagctgtacactgcccaggcaaagcgtccgggcagcgtagggggcgactcagatcccagccagtggacttagcccctgttt |
| | gctcctccgataactggggtgaccttggttaatattcaccagcagcctcccccgttgcccctctggatccactgcttaaatacggacgaggacagggccctg |
| | tctcctcagcttcaggcaccaccactgacctgggacagtgaatagatcctgagaacttcagggtgagtctatgggacccttgatgttttctttccccttcttttct |
| | atggttaagttcatgtcataggaaggggagaagtaacagggtacacatattgaccaaatcagggtaattttgcatttgtaattttaaaaaatgctttcttcttttaat |
| | atacttttttgtttatcttatttctaatactttccctaatctctttctttcagggcaataatgatacaatgtatcatgcctctttgcaccattctaaagaataacagtgataa |
| | tttctgggttaaggcaatagcaatatttctgcatataaatatttctgcatataaattgtaactgatgtaagaggtttcatattgctaatagcagctacaatccagcta |
| | ccattctgcttttattttctggttgggataaggctggattattctgagtccaagctaggcccttttgctaatcttgttcatacctcttatcttcctcccacagctcctgg |
| | gcaacctgctggtctctctgctggcccatcactttggcaaagcacgcgtgccaccatggccagcaggctgaccctgctgaccctgctgctgctcctgctgg |
| | ctggggatagggccagcagcaaccccaatgctactagcagcagcagccaggatcctgagagcctgcaggacagaggggaagggaaggtggccacc |
| | actgtgatcagcaagatgctgtttgtggagcctatcctggaggtgagctctctgcccaccactaacagcaccaccaattctgctactaagatcactgccaaca |
| | ccactgatgagcccaccacccagcctaccactgagccaactacccagcccaccatccagcccacccagcccaccactcagctgcctactgattctcctac |
| | tcagcctaccactgggagcttctgccctgggcctgtgaccctgtgctctgacctggagtctcattctactgaggctgtgctgggggatgccctggtggacttc |
| | agcctgaagctgtaccatgctttctctgccatgaagaaggtggagactaacatggccttctctcctttctctattgccagcctgctgactcaggtgctgctggg |
| | ggctggggagaataccaagactaacctggagagcatcctgtcttatcctaaggacttcacttgtgtgcatcaggccctgaagggcttcaccaccaaggggg |
| | tgacttctgtgagccagattttccacagccctgacctggccatcagagacacctttgtgaatgccagcaggaccctgtattctagctctcccagggtgctgag |
| | caacaactctgatgccaatctggaactgatcaacacttgggtggccaagaacaccaacaacaagatcagcaggctgctggatagcctgccctctgacacc |
| | aggctggtgctgctgaatgccatctacctgtctgccaagtggaagaccacctttgaccccaagaagactaggatggagcccttccacttcaagaactctgtg |
| | atcaaggtgcccatgatgaatagcaagaagtaccctgtggcccacttcattgaccagaccctgaaggccaaggtggggcagctgcagctgagccacaac |
| | ctgagcctggtgatcctggtgccccagaacctgaagcacagactggaggacatggagcaggccctgagcccatctgtgttcaaggctattatggagaagc |
| | tggagatgtctaagtttcagcctaccctgctgaccctgcccaggatcaaggtgactaccagccaggacatgctgagcatcatggagaagctggaattctttg |
| | acttcagctatgatctgaatctgtgtggcctgactgaagaccctgatttgcaggtgtctgctatgcagcaccagactgtgctggaactgactgagactggggt |
| | ggaggctgctgctgcctctgccatctctgtggccaggaccctgctggtgtttgaggtgcagcagcctttcctgtttgtgctgtgggatcagcagcacaagttc |
| | cctgtgttcatgggcagggtgtatgaccctagggcttgaagatctagagctgaattcctgcagccagggggatcagcctctactgtgccttctagttgccagc |
| | catctgttgtttgcccctcccccttgccttccttgaccctggaaggtgccactcccactgtcctttcctaataaaatgaggaaattgcatcacattgtctgagtag |
| | gtgtcattctattctggggggtggggtggggcaggacagcaagggggaggattgggaagacaatagcaggcatgctggggatgcagtgggctctatgg |
| | cttctgaggcagaaagaaccagctggggctcgagatccactagggccgcaggaacccctagtgatggagttggccactccctctctgcgcgctcgctcg |
| | ctcactgaggccgggcgaccaaaggtcgcccgacgcccgggctttgcccgggcggcctcagtgagcgagcgagcgcgcag |
| 22 | ctgcgcgctcgctcgctcactgaggccgcccgggcaaagcccgggcggcctcagtgagcgagcgagcgcgcagagagggagtggccaactccatca |
| | ctaggggttcctgcggcctagtaggctcagaggcacacaggagtttctgggctcaccctgcccccttccaacccctcagttcccatcctccagcagctgttt |
| | gtgtgctgcctctgaagtccacactgaacaaacttcagcctactcatgtccctaaaatgggcaaacattgcaagcagcaaacagcaaacacacagccctcc |
| | ctgcctgctgaccttggagctggggcagaggtcagagacctctctgggcccatgccacctccaacatccactcgaccccttggaatttcggtggagagga |
| | gcagaggttgtcctggcgtggtttaggtagtgtgagaggggtacccggggatcttgctaccagtggaacagccactaaggattctgcagtgagagcagag |
| | ggccagctaagtggtactctcccagagactgtctgactcacgccaccccctccaccttggacacaggacgctgtggtttctgagccaggtacaatgactcct |
| | ttcggtaagtgcagtggaagctgtacactgcccaggcaaagcgtccgggcagcgtaggcgggcgactcagatcccagccagtggacttagcccctgttt |
| | gctcctccgataactggggtgaccttggttaatattcaccagcagcctcccccgttgcccctctggatccactgcttaaatacggacgaggacagggccctg |
| | tctcctcagcttcaggcaccaccactgacctgggacagtgaatagatcctgagaacttcagggtgagtctatgggacccttgatgttttctttccccttcttttct |
| | atggttaagttcatgtcataggaaggggagaagtaacagggtacacatattgaccaaatcagggtaattttgcatttgtaattttaaaaaatgctttcttcttttaat |
| | atacttttttgtttatcttatttctaatactttccctaatctctttctttcagggcaataatgatacaatgtatcatgcctctttgcaccattctaaagaataacagtgataa |
| | tttctgggttaaggcaatagcaatatttctgcatataaatatttctgcatataaattgtaactgatgtaagaggtttcatattgctaatagcagctacaatccagcta |
| | ccattctgcttttattttctggttgggataaggctggattattctgagtccaagctaggcccttttgctaatcttgttcatacctcttatcttcctcccacagctcctgg |
| | gcaacctgctggtctctctgctggcccatcactttggcaaagcacgcgtgccaccatggcctctaggctgactctgctgactctgctgctcctgctgctggct |
| | ggggacagggccagctctaaccccaatgctacttctagctcctctcaggaccctgagagcctgcaggacaggggggagggcaaggtggccaccactgt |
| | gatctctaagatgctgtttgtggagcccatcctggaggtgagcagcctgcccaccaccaacagcaccaccaactctgccactaagatcactgccaacacca |
| | ctgatgagcccaccacccagcccactactgagcccaccacccagcctactatccagcccacccagcccactacccagctgcccactgacagccctaccc |
| | agcccaccactggcagcttctgccctgggcctgtgaccctgtgctctgacctggagagccattctactgaggctgtgctgggggatgccctggtggacttct |
| | ctctgaagctgtaccatgctttctctgccatgaagaaggtggagactaacatggcttttagccccttcagcattgctagcctgctgacccaggtgctgctggg |
| | ggctggggagaacactaagaccaacctggaatctatcctgagctaccccaaggacttcacctgtgtgcaccaggccctgaagggcttcaccaccaaggg |
| | ggtgacctctgtgagccagatcttccacagccctgacctggccatcagggatacttttgtgaatgccagcagaaccctgtactcttctagccccagggtgct |
| | gagcaataattctgatgctaacctggagctgatcaatacctgggtggctaagaataccaacaacaagattagcaggctgctggactctctgccttctgatacc |
| | aggctggtgctgctgaatgccatttacctgtctgccaagtggaagaccacttttgaccctaagaagactaggatggagcctttccacttcaagaactctgtcat |
| | taaggtgcccatgatgaacagcaagaagtatcctgtggcccactttattgaccagactctgaaggccaaggtgggccagctgcagctgagccataacctg |
| | agcctggtgatcctggtgccccagaacctgaagcataggctggaggacatggagcaggctctgagcccctctgtgttcaaggctattatggagaagctgg |
| | agatgagcaagttccagcccactctgctgaccctgcccagaatcaaggtgaccacctctcaggacatgctgagcatcatggaaaagctggagttctttgact |
| | tttcttatgacctgaatctgtgtggcctgactgaggatcctgatctgcaggtgtctgccatgcagcaccagactgtgctggagctgactgagactggggtgga |
| | ggctgctgctgcttctgccatctctgtggccaggaccctgctggtgtttgaggtgcagcagcccttcctgtttgtgctgtgggaccagcagcacaagtttcctg |
| | tgttcatgggcagggtgtatgaccccagagcctgaagatctagagctgaattcctgcagccagggggatcagcctctactgtgccttctagttgccagccat |
| | ctgttgtttgcccctcccccttgccttccttgaccctggaaggtgccactcccactgtcctttcctaataaaatgaggaaattgcatcacattgtctgagtaggtg |
| | tcattctattctggggggtggggggggcaggacagcaagggggaggattgggaagacaatagcaggcatgctggggatgcagtgggctctatggcttc |
| | tgaggcagaaagaaccagctggggctcgagatccactagggccgcaggaacccctagtgatggagttggccactccctctctgcgcgctcgctcgctca |
| | ctgaggccgggcgaccaaaggtcgcccgacgcccgggctttgcccgggcggcctcagtgagcgagcgagcgcgcag |
| 23 | ctgcgcgctcgctcgctcactgaggccgcccgggcaaagcccgggcggcctcagtgagcgagcgagcgcgcagagagggagtggccaactccatca |
| | ctaggggttcctgcggcctagtaggctcagaggcacacaggagtttctgggctcaccctgcccccttccaacccctcagttcccatcctccagcagctgttt |
| | gtgtgctgcctctgaagtccacactgaacaaacttcagcctactcatgtccctaaaatgggcaaacattgcaagcagcaaacagcaaacacacagccctcc |
| | ctgcctgctgaccttggagctggggcagaggtcagagacctctctgggcccatgccacctccaacatccactcgaccccttggaatttcggtggagagga |
| | gcagaggttgtcctggcgtggtttaggtagtgtgagaggggtacccggggatcttgctaccagtggaacagccactaaggattctgcagtgagagcagag |
| | ggccagctaagtggtactctcccagagactgtctgactcacgccaccccctccaccttggacacaggacgctgtggtttctgagccaggtacaatgactcct |
| | ttcggtaagtgcagtggaagctgtacactgcccaggcaaagcgtccgggcagcgtaggcgggcgactcagatcccagccagtggacttagcccctgttt |
| | gctcctccgataactggggtgaccttggttaatattcaccagcagcctcccccgttgcccctctggatccactgcttaaatacggacgaggacagggccctg |
| | tctcctcagcttcaggcaccaccactgacctgggacagtgaatagatcctgagaacttcagggtgagtctatgggacccttgatgttttctttccccttcttttct |
| | atggttaagttcatgtcataggaaggggagaagtaacagggtacacatattgaccaaatcagggtaattttgcatttgtaattttaaaaaatgctttcttcttttaat |
| | atacttttttgtttatcttatttctaatactttccctaatctctttctttcagggcaataatgatacaatgtatcatgcctctttgcaccattctaaagaataacagtgataa |
| | tttctgggttaaggcaatagcaatatttctgcatataaatatttctgcatataaattgtaactgatgtaagaggtttcatattgctaatagcagctacaatccagcta |
| | ccattctgcttttattttctggttgggataaggctggattattctgagtccaagctaggcccttttgctaatcttgttcatacctcttatcttcctcccacagctcctgg |
| | gcaacctgctggtctctctgctggcccatcactttggcaaagcacgcgtgccaccatggctagcaggctgaccctgctgaccctgctgctcctgctgctggc |
| | tggggacagggcctctagcaatcccaatgccacctctagctctagccaggatcctgagagcctgcaggacaggggggagggcaaggggccaccact |
| | gtgatcagcaagatgctgtttgtggagcccattctggaggtgtcttctctgcccaccaccaatagcaccactaattctgccaccaagatcactgctaacacca |
| | ctgatgagcccaccactcagcctaccactgagcccaccacccagcccactatccagcccacccagcccaccacccagctgcctactgacagccctaccc |
| | agcccactactgggagcttctgccctggccctgtgaccctgtgctctgacctggagagccacagcactgaggctgtgctgggggatgccctggtggactt |
| | cagcctgaagctgtaccatgccttttctgccatgaagaaggtggagaccaacatggcctttagccctttcagcattgccagcctgctgactcaggtgctgctg |
| | ggggctggggagaacaccaagaccaacctggagagcatcctgagctaccccaaggacttcacttgtgtgcaccaggccctgaagggcttcactaccaa |
| | gggggtgacttctgtgagccagatcttccacagccctgacctggccatcagggatacttttgtgaatgccagcaggaccctgtacagcagcagccccagg |
| | gtgctgagcaacaactctgatgctaacctggagctgatcaatacttgggtggccaagaacaccaacaacaagatttctaggctgctggactctctgccctct |
| | gacactaggctggtgctgctgaatgccatctacctgtctgccaagtggaagaccacctttgatcccaagaagactaggatggagcccttccacttcaagaac |
| | tctgtgatcaaggtgcccatgatgaacagcaagaagtaccctgtggcccatttcattgaccagaccctgaaggccaaggtggggcagctgcagctgagcc |
| | acaatctgagcctggtgattctggtgccccagaatctgaagcacagactggaggacatggagcaggctctgtctccctctgtgttcaaggccatcatggag |
| | aagctggagatgagcaagttccagcccactctgctgactctgcctaggatcaaggtgaccaccagccaggacatgctgagcattatggagaagctggagt |
| | tctttgacttcagctatgacctgaacctgtgtggcctgactgaggaccctgatctgcaggtgtctgccatgcagcaccagactgtgctggagctgactgaga |
| | ctggggtggaggctgctgctgcctctgctatttctgtggccaggaccctgctggtgtttgaggtgcagcagcccttcctgtttgtgctgtgggaccagcagca |
| | caagtttcctgtgttcatggggagggtgtatgaccccagggcctgaagatctagagctgaattcctgcagccagggggatcagcctctactgtgccttctagt |
| | tgccagccatctgttgtttgcccctcccccttgccttccttgaccctggaaggtgccactcccactgtcctttcctaataaaatgaggaaattgcatcacattgtc |
| | tgagtaggtgtcattctattctggggggtggggggggcaggacagcaagggggaggattgggaagacaatagcaggcatgctggggatgcagtgggc |
| | tctatggcttctgaggcagaaagaaccagctggggctcgagatccactagggccgcaggaacccctagtgatggagttggccactccctctctgcgcgct |
| | cgctcgctcactgaggccgggcgaccaaaggtcgcccgacgcccgggctttgcccgggcggcctcagtgagcgagcgagcgcgcag |
| 24 | ctgcgcgctcgctcgctcactgaggccgcccgggcaaagcccgggcggcctcagtgagcgagcgagcgcgcagagagggagtggccaactccatca |
| | ctaggggttcctgcggcctagtaggctcagaggcacacaggagtttctgggctcaccctgcccccttccaacccctcagttcccatcctccagcagctgttt |
| | gtgtgctgcctctgaagtccacactgaacaaacttcagcctactcatgtccctaaaatgggcaaacattgcaagcagcaaacagcaaacacacagccctcc |
| | ctgcctgctgaccttggagctggggcagaggtcagagacctctctgggcccatgccacctccaacatccactcgaccccttggaatttcggtggagagga |
| | gcagaggttgtcctggcgtggtttaggtagtgtgagaggggtacccggggatcttgctaccagtggaacagccactaaggattctgcagtgagagcagag |
| | ggccagctaagtggtactctcccagagactgtctgactcacgccaccccctccaccttggacacaggacgctgtggtttctgagccaggtacaatgactcct |
| | ttcggtaagtgcagtggaagctgtacactgcccaggcaaagcgtccgggcagcgtaggcgggcgactcagatcccagccagtggacttagcccctgttt |
| | gctcctccgataactggggtgaccttggttaatattcaccagcagcctcccccgttgcccctctggatccactgcttaaatacggacgaggacagggccctg |
| | tctcctcagcttcaggcaccaccactgacctgggacagtgaatagatcctgagaacttcagggtgagtctatgggacccttgatgttttctttccccttcttttct |
| | atggttaagttcatgtcataggaaggggagaagtaacagggtacacatattgaccaaatcagggtaattttgcatttgtaattttaaaaaatgctttcttcttttaat |
| | atacttttttgtttatcttatttctaatactttccctaatctctttctttcagggcaataatgatacaatgtatcatgcctctttgcaccattctaaagaataacagtgataa |
| | tttctgggttaaggcaatagcaatatttctgcatataaatatttctgcatataaattgtaactgatgtaagaggtttcatattgctaatagcagctacaatccagcta |
| | ccattctgcttttattttctggttgggataaggctggattattctgagtccaagctaggcccttttgctaatcttgttcatacctcttatcttcctcccacagctcctgg |
| | gcaacctgctggtctctctgctggcccatcactttggcaaagcacgcgtgccaccatggcctccaggctgaccctgctgaccctcctgctgctcctgctggc |
| | tggggatagagcctctagcaatccaaatgctaccagctcctcctcccaggatcctgaatcccttcaagacaggggggagggcaaggtggcaactactgtg |
| | atttccaagatgctgtttgtggagcccatcctggaggttagcagccttcctactaccaactcaacaaccaattcagccaccaaaattacagctaataccacag |
| | atgagccaacaactcaacccaccactgagcccaccactcagccaaccatccaacccacccaaccaactacccagctcccaacagattctcctacccagc |
| | ctaccactggctccttctgcccaggacctgttactctctgctctgacttggaaagccattctactgaggctgtcctgggggatgctttggtagacttctccctga |
| | agctctaccatgcattttcagcaatgaagaaggtggagaccaacatggccttttccccattcagtatagcaagtctcctgactcaggtcctgctgggggcag |
| | gggagaatacaaagaccaacctggagagcatcctcagttatcccaaggacttcacctgtgtccaccaggccctgaagggcttcacaacaaagggggtga |
| | cctcagtctctcagattttccacagcccagacctggccataagggacacctttgtgaatgcctctaggaccctgtactcaagctcccccagagtcctaagcaa |
| | caacagtgatgcaaatttggagctcatcaacacctgggtggccaagaacaccaacaacaagatcagcaggctgctagacagtctgccaagtgatacaag |
| | gcttgtcctcctcaatgctatctacctgagtgccaagtggaagacaacatttgatcccaagaaaaccagaatggaaccctttcacttcaaaaactcagttataa |
| | aagtgcccatgatgaatagcaagaagtaccctgtggcccatttcattgaccaaactttgaaagccaaggtggggcagctgcagctctcccacaatctgagtc |
| | tggtaatcctggtaccccagaacctgaaacataggcttgaagacatggaacaggctctcagcccttctgttttcaaggccataatggagaagctggagatgt |
| | ccaagttccagcccactctcctaacactacccaggatcaaagtgacaaccagccaggatatgctctcaatcatggagaaattggaattttttgatttttcttatg |
| | accttaacctgtgtgggctgacagaggaccctgatcttcaggtttctgcaatgcagcaccagacagtgctggaactgacagagactggggtggaagctgct |
| | gcagcaagtgcaatatctgtggccagaaccctgctggtctttgaagtgcagcagcccttcctgtttgtgctgtgggaccagcagcacaagttccctgtcttca |
| | tggggagggtatatgaccccagggcctgaagatctagagctgaattcctgcagccagggggatcagcctctactgtgccttctagttgccagccatctgttg |
| | tttgcccctcccccttgccttccttgaccctggaaggtgccactcccactgtcctttcctaataaaatgaggaaattgcatcacattgtctgagtaggtgtcattct |
| | attctggggggtggggtggggcaggacagcaagggggaggattgggaagacaatagcaggcatgctggggatgcagtgggctctatggcttctgagg |
| | cagaaagaaccagctggggctcgagatccactagggccgcaggaacccctagtgatggagttggccactccctctctgcgcgctcgctcgctcactgag |
| | gccgggcgaccaaaggtcgcccgacgcccgggctttgcccgggcggcctcagtgagcgagcgagcgcgcag |
| 25 | ctgcgcgctcgctcgctcactgaggccgcccgggcaaagcccgggcggcctcagtgagcgagcgagcgcgcagagagggagtggccaactccatca |
| | ctaggggttcctgcggcctagtaggctcagaggcacacaggagtttctgggctcaccctgcccccttccaacccctcagttcccatcctccagcagctgttt |
| | gtgtgctgcctctgaagtccacactgaacaaacttcagcctactcatgtccctaaaatgggcaaacattgcaagcagcaaacagcaaacacacagccctcc |
| | ctgcctgctgaccttggagctggggcagaggtcagagacctctctgggcccatgccacctccaacatccactcgaccccttggaatttcggtggagagga |
| | gcagaggttgtcctggcgtggtttaggtagtgtgagaggggtacccggggatcttgctaccagtggaacagccactaaggattctgcagtgagagcagag |
| | ggccagctaagtggtactctcccagagactgtctgactcacgccaccccctccaccttggacacaggacgctgtggtttctgagccaggtacaatgactcct |
| | ttcggtaagtgcagtggaagctgtacactgcccaggcaaagcgtccgggcagcgtaggcgggcgactcagatcccagccagtggacttagcccctgttt |
| | gctcctccgataactggggtgaccttggttaatattcaccagcagcctcccccgttgcccctctggatccactgcttaaatacggacgaggacagggccctg |
| | tctcctcagcttcaggcaccaccactgacctgggacagtgaatagatcctgagaacttcagggtgagtctatgggacccttgatgttttctttccccttcttttct |
| | atggttaagttcatgtcataggaaggggagaagtaacagggtacacatattgaccaaatcagggtaattttgcatttgtaattttaaaaaatgctttcttcttttaat |
| | atacttttttgtttatcttatttctaatactttccctaatctctttctttcagggcaataatgatacaatgtatcatgcctctttgcaccattctaaagaataacagtgataa |
| | tttctgggttaaggcaatagcaatatttctgcatataaatatttctgcatataaattgtaactgatgtaagaggtttcatattgctaatagcagctacaatccagcta |
| | ccattctgcttttattttctggttgggataaggctggattattctgagtccaagctaggcccttttgctaatcttgttcatacctcttatcttcctcccacagctcctgg |
| | gcaacctgctggtctctctgctggcccatcactttggcaaagcacgcgtgccaccatggcctccaggctgaccctgctcaccctcctgctgctcctgctggc |
| | tggggacagggcctccagcaaccccaatgcaaccagcagttcctctcaggatccagagtccctgcaggacaggggggagggcaaggtggccaccact |
| | gtgatctccaagatgctgtttgtggagcccatcctggaggtatccagcctccctaccaccaacagcaccaccaactcagccaccaaaatcactgctaacac |
| | cactgatgagcccacaacccagccaactactgagccaaccactcagcctaccatccaacccacccagcctactacccagctccccactgactctcctacc |
| | cagcccaccactggcagcttctgcccaggacctgtgaccctctgctctgacttggagtcccattccacagaggcagtgctgggggatgccctggtagactt |
| | ctccctgaagctctaccatgcattctctgccatgaagaaggtggagaccaacatggccttctcccccttcagcattgccagcctcctgacccaggtcctgctg |
| | ggggcaggggagaacacaaagacaaacctggagtccatcctcagctaccccaaggacttcacctgtgtccaccaggccctgaagggcttcacaaccaa |
| | gggggtgaccagtgtctcacagattttccacagcccagacctggccatcagggacacctttgtgaatgccagtaggaccctgtacagctccagtcccaga |
| | gtcctcagcaacaactctgatgccaacctggagctgatcaacacctgggggccaagaacaccaacaacaagatcagcaggctgctagactcactgccct |
| | ctgacacaaggctggtcctcctcaatgcaatctacctgagtgccaagtggaagaccacctttgaccccaagaagaccaggatggagcccttccacttcaag |
| | aacagtgtcattaaggtgcccatgatgaacagcaagaagtaccctgtggcccacttcattgaccagaccttgaaggccaaggtggggcagctgcagctct |
| | cccacaacctgtcactggtcatcctggttccccagaacctgaagcacaggcttgaggacatggagcaggccctcagcccttctgtattcaaggccataatg |
| | gagaagctggagatgagcaagttccagcccactctgctgaccctacccaggatcaaggtgaccaccagccaggacatgctctcaatcatggagaagttg |
| | gagttctttgacttcagctatgacctgaacctgtgtgggctgacagaggaccctgacctgcaggtgtcagccatgcagcaccagacagtgctggaactgac |
| | agagactggggtggaagctgctgcagcaagtgctatttcagtggccaggaccctgctggtctttgaggtccagcagcccttcctgtttgtgctctgggacca |
| | gcagcacaagttccctgtcttcatggggagggtctatgaccccagggcctgaagatctagagctgaattcctgcagccagggggatcagcctctactgtgc |
| | cttctagttgccagccatctgttgtttgcccctcccccttgccttccttgaccctggaaggtgccactcccactgtcctttcctaataaaatgaggaaattgcatc |
| | acattgtctgagtaggtgtcattctattctggggggtggggggggcaggacagcaagggggaggattgggaagacaatagcaggcatgctggggatgc |
| | agtgggctctatggcttctgaggcagaaagaaccagctggggctcgagatccactagggccgcaggaacccctagtgatggagttggccactccctctct |
| | gcgcgctcgctcgctcactgaggccgggcgaccaaaggtcgcccgacgcccgggctttgcccgggcggcctcagtgagcgagcgagcgcgcag |
| 26 | ctgcgcgctcgctcgctcactgaggccgcccgggcaaagcccgggcggcctcagtgagcgagcgagcgcgcagagagggagtggccaactccatca |
| | ctaggggttcctgcggcctagtaggctcagaggcacacaggagtttctgggctcaccctgcccccttccaacccctcagttcccatcctccagcagctgttt |
| | gtgtgctgcctctgaagtccacactgaacaaacttcagcctactcatgtccctaaaatgggcaaacattgcaagcagcaaacagcaaacacacagccctcc |
| | ctgcctgctgaccttggagctggggcagaggtcagagacctctctgggcccatgccacctccaacatccactcgaccccttggaatttcggtggagagga |
| | gcagaggttgtcctggcgtggtttaggtagtgtgagaggggtacccggggatcttgctaccagtggaacagccactaaggattctgcagtgagagcagag |
| | ggccagctaagtggtactctcccagagactgtctgactcacgccaccccctccaccttggacacaggacgctgtggtttctgagccaggtacaatgactcct |
| | ttcggtaagtgcagtggaagctgtacactgcccaggcaaagcgtccgggcagcgtaggcgggcgactcagatcccagccagtggacttagcccctgttt |
| | gctcctccgataactggggtgaccttggttaatattcaccagcagcctcccccgttgcccctctggatccactgcttaaatacggacgaggacagggccctg |
| | tctcctcagcttcaggcaccaccactgacctgggacagtgaatagatcctgagaacttcagggtgagtctatgggacccttgatgttttctttccccttcttttct |
| | atggttaagttcatgtcataggaaggggagaagtaacagggtacacatattgaccaaatcagggtaattttgcatttgtaattttaaaaaatgctttcttcttttaat |
| | atacttttttgtttatcttatttctaatactttccctaatctctttctttcagggcaataatgatacaatgtatcatgcctctttgcaccattctaaagaataacagtgataa |
| | tttctgggttaaggcaatagcaatatttctgcatataaatatttctgcatataaattgtaactgatgtaagaggtttcatattgctaatagcagctacaatccagcta |
| | ccattctgcttttattttctggttgggataaggctggattattctgagtccaagctaggcccttttgctaatcttgttcatacctcttatcttcctcccacagctcctgg |
| | gcaacctgctggtctctctgctggcccatcactttggcaaagcacgcgtgccaccatggcctccaggctgaccctgctgaccctcctgctgctcctgctggc |
| | tggggacagagccagcagcaaccccaatgccaccagctccagctctcaggacccagagagcctgcaggacaggggggagggcaaggtggccacca |
| | cagtgatcagcaagatgctgtttgtggagcccatcctggaggtgagcagcctccccaccaccaacagcaccaccaattctgccaccaagatcacagccaa |
| | caccacagatgagcccacaacccagcctaccacagagccaaccacacagcccaccatccaacccacccaacctactacccagctgcccacagacagc |
| | cctacccagcctaccacaggcagcttctgccctggccctgtgaccctgtgctctgacttggagagccactccacagaggctgtgctgggggatgccctggt |
| | ggatttcagcctgaagctgtaccatgccttctctgccatgaagaaggtggagaccaacatggccttcagccccttcagcattgccagcctcctgacccaggt |
| | cctgctgggggctggggagaacacaaagaccaacctggagagcatcctgagctaccccaaggacttcacctgtgtgcaccaggccctgaagggcttca |
| | ccaccaagggggtgacctctgtgagccagattttccacagccctgacctggccatcagggacacctttgtgaatgcctccaggaccctgtacagctctagc |
| | cccagggtgctgagcaacaactctgatgccaacttggagctgatcaacacctgggtggccaagaacaccaacaacaagatcagcaggctgctggacag |
| | cctgccctctgacaccaggctggtgctcctgaatgccatctacctgtctgccaagtggaagaccacctttgaccccaagaagaccagaatggagcccttcc |
| | acttcaagaactctgtgataaaggtgcccatgatgaacagcaagaagtaccctgtggcccacttcattgaccagaccctgaaagccaaggtgggccagct |
| | gcagctcagccacaacctgagcctggtcatcctggtgccccagaacctgaagcacaggctggaggacatggaacaggccctcagcccctctgtgttcaa |
| | ggccattatggagaagctggagatgagcaagttccagcccactctgctgacactgcccaggatcaaggtgaccaccagccaggacatgctgagcatcat |
| | ggagaagttggagttctttgacttcagctatgacctgaacctgtgtggcctgacagaggaccctgacctccaggtgtctgccatgcagcaccagacagtgct |
| | ggaactgacagagacaggggtggaagctgctgctgcctctgccatctctgtggccagaaccctgctggtgtttgaggtgcagcagcccttcctgtttgtgct |
| | gtgggaccagcagcacaagttccctgtgttcatgggcagggtgtatgaccccagggcctgaagatctagagctgaattcctgcagccagggggatcagc |
| | ctctactgtgccttctagttgccagccatctgttgtttgcccctcccccttgccttccttgaccctggaaggtgccactcccactgtcctttcctaataaaatgagg |
| | aaattgcatcacattgtctgagtaggtgtcattctattctggggggtggggggggcaggacagcaagggggaggattgggaagacaatagcaggcatgc |
| | tggggatgcagtgggctctatggcttctgaggcagaaagaaccagctggggctcgagatccactagggccgcaggaacccctagtgatggagttggcca |
| | ctccctctctgcgcgctcgctcgctcactgaggccgggcgaccaaaggtcgcccgacgcccgggctttgcccgggcggcctcagtgagcgagcgagc |
| | gcgcag |
| 27 | ctgcgcgctcgctcgctcactgaggccgcccgggcaaagcccgggcggcctcagtgagcgagcgagcgcgcagagagggagtggccaactccatca |
| | ctaggggttcctgcggcctagtaggctcagaggcacacaggagtttctgggctcaccctgcccccttccaacccctcagttcccatcctccagcagctgttt |
| | gtgtgctgcctctgaagtccacactgaacaaacttcagcctactcatgtccctaaaatgggcaaacattgcaagcagcaaacagcaaacacacagccctcc |
| | ctgcctgctgaccttggagctggggcagaggtcagagacctctctgggcccatgccacctccaacatccactcgaccccttggaatttcggtggagagga |
| | gcagaggttgtcctggcgtggtttaggtagtgtgagaggggtacccggggatcttgctaccagtggaacagccactaaggattctgcagtgagagcagag |
| | ggccagctaagtggtactctcccagagactgtctgactcacgccaccccctccaccttggacacaggacgctgtggtttctgagccaggtacaatgactcct |
| | ttcggtaagtgcagtggaagctgtacactgcccaggcaaagcgtccgggcagcgtaggcgggcgactcagatcccagccagtggacttagcccctgttt |
| | gctcctccgataactggggtgaccttggttaatattcaccagcagcctcccccgttgcccctctggatccactgcttaaatacggacgaggacagggccctg |
| | tctcctcagcttcaggcaccaccactgacctgggacagtgaatagatcctgagaacttcagggtgagtctatgggacccttgatgttttctttccccttcttttct |
| | atggttaagttcatgtcataggaaggggagaagtaacagggtacacatattgaccaaatcagggtaattttgcatttgtaattttaaaaaatgctttcttcttttaat |
| | atacttttttgtttatcttatttctaatactttccctaatctctttctttcagggcaataatgatacaatgtatcatgcctctttgcaccattctaaagaataacagtgataa |
| | tttctgggttaaggcaatagcaatatttctgcatataaatatttctgcatataaattgtaactgatgtaagaggtttcatattgctaatagcagctacaatccagcta |
| | ccattctgcttttattttctggttgggataaggctggattattctgagtccaagctaggcccttttgctaatcttgttcatacctcttatcttcctcccacagctcctgg |
| | gcaacctgctggtctctctgctggcccatcactttggcaaagcacgcgtgccaccatggcctctaggctgactctgctgactctgctgctcctgctgctggct |
| | ggggacagggccagctctaaccccaatgctacttctagctcctctcaggaccctgagagccttcaggacaggggggagggcaaggtggccaccactgt |
| | gatctctaagatgctgtttgtggagcccatcctggaggtgagcagcctgcccaccaccaacagcaccaccaactctgccactaagatcactgccaacacca |
| | ctgatgagcccaccacccagcccactactgagcccaccacccagcctactatccagcccacccagcccactacccagctgcccactgacagccctaccc |
| | agcccaccactggcagcttctgccctgggcctgtgaccctgtgctctgacctggagagccattctactgaggctgtgctgggggatgccctggtggacttct |
| | ctctgaagctgtaccatgctttctctgccatgaagaaggtggagactaacatggcttttagccccttcagcattgctagcctgctgacccaggtgctgctggg |
| | ggctggggagaacactaagaccaacctggaatctatcctgagctaccccaaggacttcacctgtgtgcaccaggccctgaagggcttcaccaccaaggg |
| | ggtgacctctgtgagccagatcttccacagccctgacctggccatcagggatacttttgtgaatgccagcagaaccctgtactcttctagccccagggtgct |
| | gagcaataattctgatgctaacctggagctgatcaatacctgggtggctaagaataccaacaacaagattagcaggctgctggactctctgccttctgatacc |
| | aggctggtgctgctgaatgccatttacctgtctgccaagtggaagaccacttttgaccctaagaagactaggatggagcctttccacttcaagaactctgtcat |
| | taaggtgcccatgatgaacagcaagaagtatcctgtggcccactttattgaccagactctgaaggccaaggtgggccagcttcagctgagccataacctga |
| | gcctggtgatcctggtgccccagaacctgaagcataggctggaggacatggagcaggctctgagcccctctgtgttcaaggctattatggagaagctgga |
| | gatgagcaagttccagcccactctgctgaccctgcccagaatcaaggtgaccacctctcaggacatgctgagcatcatggaaaagctggagttctttgactt |
| | ttcttatgacctgaatctgtgtggcctgactgaggatcctgatcttcaggtgtctgccatgcagcaccagactgtgctggagctgactgagactggggtggag |
| | gctgctgctgcttctgccatctctgtggccaggaccctgctggtgtttgaggtgcagcagcccttcctgtttgtgctgtgggaccagcagcacaagtttcctgt |
| | gttcatgggcagggtgtatgaccccagagcctgaagatctagagctgaattccttcagccagggggatcagcctctactgtgccttctagttgccagccatct |
| | gttgtttgcccctcccccttgccttccttgaccctggaaggtgccactcccactgtcctttcctaataaaatgaggaaattgcatcacattgtctgagtaggtgtc |
| | attctattctggggggtggggtggggcaggacagcaagggggaggattgggaagacaatagcaggcatgctggggatgcagtgggctctatggcttctg |
| | aggcagaaagaaccagctggggctcgagatccactagggccgcaggaacccctagtgatggagttggccactccctctctgcgcgctcgctcgctcact |
| | gaggccgggcgaccaaaggtcgcccgacgcccgggctttgcccgggcggcctcagtgagcgagcgagcgcgcag |
| 28 | ctgcgcgctcgctcgctcactgaggccgcccgggcaaagcccgggcggcctcagtgagcgagcgagcgcgcagagagggagtggccaactccatca |
| | ctaggggttcctgcggcctagtactaggctcagaggcacacaggagtttctgggctcaccctgcccccttccaacccctcagttcccatcctccagcagctg |
| | tttgtgtgctgcctctgaagtccacactgaacaaacttcagcctactcatgtccctaaaatgggcaaacattgcaagcagcaaacagcaaacacacagccct |
| | ccctgcctgctgaccttggagctggggcagaggtcagagacctctctgggcccatgccacctccaacatccactcgaccccttggaatttcggtggagag |
| | gagcagaggttgtcctggcgtggtttaggtagtgtgagaggggtacccggggatcttgctaccagtggaacagccactaaggattctgcagtgagagcag |
| | agggccagctaagtggtactctcccagagactgtctgactcacgccaccccctccaccttggacacaggacgctgtggtttctgagccaggtacaatgact |
| | cctttcggtaagtgcagtggaagctgtacactgcccaggcaaagcgtccgggcagcgtagggggcgactcagatcccagccagtggacttagcccctg |
| | tttgctcctccgataactggggtgaccttggttaatattcaccagcagcctcccccgttgcccctctggatccactgcttaaatacggacgaggacagggccc |
| | tgtctcctcagcttcaggcaccaccactgacctgggacagtgaatagatcttgagaacttcagggtgagtctatgggacccttgatgttttctttccccttcttttc |
| | tatggttaagttcatgtcataggaaggggagaagtaacagggtacacatattgaccaaatcagggtaattttgcatttgtaattttaaaaaatgctttcttcttttaa |
| | tatacttttttgtttatcttatttctaatactttccctaatctctttctttcagggcaataatgatacaatgtatcatgcctctttgcaccattctaaagaataacagtgata |
| | atttctgggttaaggcaatagcaatatttctgcatataaatatttctgcatataaattgtaactgatgtaagaggtttcatattgctaatagcagctacaatccagct |
| | accattctgcttttattttctggttgggataaggctggattattctgagtccaagctaggcccttttgctaatcttgttcatacctcttatcttcctcccacagctcctg |
| | ggcaacctgctggtctctctgctggcccatcactttggcaaagcactagtgccaccatggcctctaggctgactctgctgactctgctgctcctgctgctggct |
| | ggggacagggccagctctaaccccaatgctacttctagctcctctcaggaccctgagagcctgcaggacaggggggagggcaaggtggccaccactgt |
| | gatctctaagatgctgtttgtggagcccatcctggaggtgagcagcctgcccaccaccaacagcaccaccaactctgccactaagatcactgccaacacca |
| | ctgatgagcccaccacccagcccactactgagcccaccacccagcctactatccagcccacccagcccactacccagctgcccactgacagccctaccc |
| | agcccaccactggcagcttctgccctgggcctgtgaccctgtgctctgacctggagagccattctactgaggctgtgctgggggatgccctggtggacttct |
| | ctctgaagctgtaccatgctttctctgccatgaagaaggtggagactaacatggcttttagccccttcagcattgctagcctgctgacccaggtgctgctggg |
| | ggctggggagaacactaagaccaacctggaatctatcctgagctaccccaaggacttcacctgtgtgcaccaggccctgaagggcttcaccaccaaggg |
| | ggtgacctctgtgagccagatcttccacagccctgacctggccatcagggatacttttgtgaatgccagcagaaccctgtactcttctagccccagggtgct |
| | gagcaataattctgatgctaacctggagctgatcaatacctgggtggctaagaataccaacaacaagattagcaggctgctggactctctgccttctgatacc |
| | aggctggtgctgctgaatgccatttacctgtctgccaagtggaagaccacttttgaccctaagaagactaggatggagcctttccacttcaagaactctgtcat |
| | taaggtgcccatgatgaacagcaagaagtatcctgtggcccactttattgaccagactctgaaggccaaggtgggccagctgcagctgagccataacctg |
| | agcctggtgatcctggtgccccagaacctgaagcataggctggaggacatggagcaggctctgagcccctctgtgttcaaggctattatggagaagctgg |
| | agatgagcaagttccagcccactctgctgaccctgcccagaatcaaggtgaccacctctcaggacatgctgagcatcatggaaaagctggagttctttgact |
| | tttcttatgacctgaatctgtgtggcctgactgaggatcctgatctgcaggtgtctgccatgcagcaccagactgtgctggagctgactgagactggggtgga |
| | ggctgctgctgcttctgccatctctgtggccaggaccctgctggtgtttgaggtgcagcagcccttcctgtttgtgctgtgggaccagcagcacaagtttcctg |
| | tgttcatgggcagggtgtatgaccccagagcctgacatctagagctgaattcctgcagccagggggatcagcctctactgtgccttctagttgccagccatct |
| | gttgtttgcccctcccccttgccttccttgaccctggaaggtgccactcccactgtcctttcctaataaaatgaggaaattgcatcacattgtctgagtaggtgtc |
| | attctattctggggggtggggggggcaggacagcaagggggaggattgggaagacaatagcaggcatgctggggatgcagtgggctctatggcttctg |
| | aggcagaaagaaccagctggggctcgagatccactagggccgcaggaacccctagtgatggagttggccactccctctctgcgcgctcgctcgctcact |
| | gaggccgggcgaccaaaggtcgcccgacgcccgggctttgcccgggcggcctcagtgagcgagcgagcgcgcag |
| 29 | ctgcgcgctcgctcgctcactgaggccgcccgggcaaagcccgggcggcctcagtgagcgagcgagcgcgcagagagggagtggccaactccatca |
| | ctaggggttcctgcggcctagtactaggctcagaggcacacaggagtttctgggctcaccctgcccccttccaacccctcagttcccatcctccagcagctg |
| | tttgtgtgctgcctctgaagtccacactgaacaaacttcagcctactcatgtccctaaaatgggcaaacattgcaagcagcaaacagcaaacacacagccct |
| | ccctgcctgctgaccttggagctggggcagaggtcagagacctctctgggcccatgccacctccaacatccactcgaccccttggaatttcggtggagag |
| | gagcagaggttgtcctggcgtggtttaggtagtgtgagaggggtacccggggatcttgctaccagtggaacagccactaaggattctgcagtgagagcag |
| | agggccagctaagtggtactctcccagagactgtctgactcacgccaccccctccaccttggacacaggacgctgtggtttctgagccaggtacaatgact |
| | cctttcggtaagtgcagtggaagctgtacactgcccaggcaaagcgtccgggcagcgtaggcgggcgactcagatcccagccagtggacttagcccctg |
| | tttgctcctccgataactggggtgaccttggttaatattcaccagcagcctcccccgttgcccctctggatccactgcttaaatacggacgaggacagggccc |
| | tgtctcctcagcttcaggcaccaccactgacctgggacagtgaatagatcttgagaacttcagggtgagtctatgggacccttgatgttttctttccccttcttttc |
| | tatggttaagttcatgtcataggaaggggagaagtaacagggtacacatattgaccaaatcagggtaattttgcatttgtaattttaaaaaatgctttcttcttttaa |
| | tatacttttttgtttatcttatttctaatactttccctaatctctttctttcagggcaataatgatacaatgtatcatgcctctttgcaccattctaaagaataacagtgata |
| | atttctgggttaaggcaatagcaatatttctgcatataaatatttctgcatataaattgtaactgatgtaagaggtttcatattgctaatagcagctacaatccagct |
| | accattctgcttttattttctggttgggataaggctggattattctgagtccaagctaggcccttttgctaatcttgttcatacctcttatcttcctcccacagctcctg |
| | ggcaacctgctggtctctctgctggcccatcactttggcaaagcactagtgccaccatggctagcaggctgaccctgctgaccctgctgctcctgctgctgg |
| | ctggggacagggcctctagcaatcccaatgccacctctagctctagccaggatcctgagagcctgcaggacaggggggagggcaaggtggccaccact |
| | gtgatcagcaagatgctgtttgtggagcccattctggaggtgtcttctctgcccaccaccaatagcaccactaattctgccaccaagatcactgctaacacca |
| | ctgatgagcccaccactcagcctaccactgagcccaccacccagcccactatccagcccacccagcccaccacccagctgcctactgacagccctaccc |
| | agcccactactgggagcttctgccctggccctgtgaccctgtgctctgacctggagagccacagcactgaggctgtgctgggggatgccctggtggactt |
| | cagcctgaagctgtaccatgccttttctgccatgaagaaggtggagaccaacatggcctttagccctttcagcattgccagcctgctgactcaggtgctgctg |
| | ggggctggggagaacaccaagaccaacctggagagcatcctgagctaccccaaggacttcacttgtgtgcaccaggccctgaagggcttcactaccaa |
| | gggggtgacttctgtgagccagatcttccacagccctgacctggccatcagggatacttttgtgaatgccagcaggaccctgtacagcagcagccccagg |
| | gtgctgagcaacaactctgatgctaacctggagctgatcaatacttgggtggccaagaacaccaacaacaagatttctaggctgctggactctctgccctct |
| | gacactaggctggtgctgctgaatgccatctacctgtctgccaagtggaagaccacctttgatcccaagaagactaggatggagcccttccacttcaagaac |
| | tctgtgatcaaggtgcccatgatgaacagcaagaagtaccctgtggcccatttcattgaccagaccctgaaggccaaggtggggcagctgcagctgagcc |
| | acaatctgagcctggtgattctggtgccccagaatctgaagcacagactggaggacatggagcaggctctgtctccctctgtgttcaaggccatcatggag |
| | aagctggagatgagcaagttccagcccactctgctgactctgcctaggatcaaggtgaccaccagccaggacatgctgagcattatggagaagctggagt |
| | tctttgacttcagctatgacctgaacctgtgtggcctgactgaggaccctgatctgcaggtgtctgccatgcagcaccagactgtgctggagctgactgaga |
| | ctggggtggaggctgctgctgcctctgctatttctgtggccaggaccctgctggtgtttgaggtgcagcagcccttcctgtttgtgctgtgggaccagcagca |
| | caagtttcctgtgttcatggggagggtgtatgaccccagggcctgacatctagagctgaattcctgcagccagggggatcagcctctactgtgccttctagtt |
| | gccagccatctgttgtttgcccctcccccttgccttccttgaccctggaaggtgccactcccactgtcctttcctaataaaatgaggaaattgcatcacattgtct |
| | gagtaggtgtcattctattctggggggtggggtggggcaggacagcaagggggaggattgggaagacaatagcaggcatgctggggatgcagtgggct |
| | ctatggcttctgaggcagaaagaaccagctggggctcgagatccactagggccgcaggaacccctagtgatggagttggccactccctctctgcgcgctc |
| | gctcgctcactgaggccgggcgaccaaaggtcgcccgacgcccgggctttgcccgggcggcctcagtgagcgagcgagcgcgcag |
| 30 | ctgcgcgctcgctcgctcactgaggccgcccgggcaaagcccgggcggcctcagtgagcgagcgagcgcgcagagagggagtggccaactccatca |
| | ctaggggttcctgcggcctagtaggctcagaggcacacaggagtttctgggctcaccctgcccccttccaacccctcagttcccatcctccagcagctgttt |
| | gtgtgctgcctctgaagtccacactgaacaaacttcagcctactcatgtccctaaaatgggcaaacattgcaagcagcaaacagcaaacacacagccctcc |
| | ctgcctgctgaccttggagctggggcagaggtcagagacctctctgggcccatgccacctccaacatccactcgaccccttggaatttcggtggagagga |
| | gcagaggttgtcctggcgtggtttaggtagtgtgagaggggtacccggggatcttgctaccagtggaacagccactaaggattctgcagtgagagcagag |
| | ggccagctaagtggtactctcccagagactgtctgactcacgccaccccctccaccttggacacaggacgctgtggtttctgagccaggtacaatgactcct |
| | ttcggtaagtgcagtggaagctgtacactgcccaggcaaagcgtccgggcagcgtaggcgggcgactcagatcccagccagtggacttagcccctgttt |
| | gctcctccgataactggggtgaccttggttaatattcaccagcagcctcccccgttgcccctctggatccactgcttaaatacggacgaggacagggccctg |
| | tctcctcagcttcaggcaccaccactgacctgggacagtgaatagatcctgagaacttcagggtgagtctatgggacccttgatgttttctttccccttcttttct |
| | atggttaagttcatgtcataggaaggggagaagtaacagggtacacatattgaccaaatcagggtaattttgcatttgtaattttaaaaaatgctttcttcttttaat |
| | atacttttttgtttatcttatttctaatactttccctaatctctttctttcagggcaataatgatacaatgtatcatgcctctttgcaccattctaaagaataacagtgataa |
| | tttctgggttaaggcaatagcaatatttctgcatataaatatttctgcatataaattgtaactgatgtaagaggtttcatattgctaatagcagctacaatccagcta |
| | ccattctgcttttattttctggttgggataaggctggattattctgagtccaagctaggcccttttgctaatcttgttcatacctcttatcttcctcccacagctcctgg |
| | gcaacctgctggtctctctgctggcccatcactttggcaaagcacgcgtgccaccatggcctccaggctgaccctgctgaccctcctgctgctgctgctggc |
| | tggggatagagcctcctcaaatcccaccatccaacccacccaaccaactacccagctcccaacagattctcctacccagcccactactgggtccttctgcc |
| | caggacctgttactctctgctctgacttggagagtcattcaacagaggccgtgttgggggatgctttggtagatttctccctgaagctctaccacgccttctcag |
| | caatgaagaaggtggagaccaacatggccttttccccattcagcatcgccagcctccttacccaggtcctgctcggggctggggagaacaccaaaacaaa |
| | cctggagagcatcctctcttaccccaaggacttcacctgtgtccaccaggccctgaagggcttcacgaccaaaggtgtcacctcagtctctcagattttccac |
| | agcccagacctggccataagggacacctttgtgaatgcctctcggaccctgtacagcagcagccccagagtcctaagcaacaacagtgacgccaacttg |
| | gagctcatcaacacctgggtggccaagaacaccaacaacaagatcagccggctgctagacagtctgccctccgatacccgccttgtcctcctcaatgctat |
| | ctacctgagtgccaagtggaagacaacatttgatcccaagaaaaccagaatggaaccctttcacttcaaaaactcagttataaaagtgcccatgatgaatag |
| | caagaagtaccctgtggcccatttcattgaccaaactttgaaagccaaggtggggcagctgcagctctcccacaatctgagtttggtgatcctggtacccca |
| | gaacctgaaacatcgtcttgaagacatggaacaggctctcagcccttctgttttcaaggccatcatggagaaactggagatgtccaagttccagcccactctc |
| | ctaacactaccccgcatcaaagtgacgaccagccaggatatgctctcaatcatggagaaattggaattcttcgatttttcttatgaccttaacctgtgtgggctg |
| | acagaggaccctgatcttcaggtttctgcgatgcagcaccagacagtgctggaactgacagagactggggggaggcggctgcagcctccgccatctct |
| | gtggcccgcaccctgctggtctttgaagtgcagcagcccttcctcttcgtgctctgggaccagcagcacaagttccctgtcttcatggggcgagtatatgacc |
| | ccagggcctgaagatctagagctgaattcctgcagccagggggatcagcctctactgtgccttctagttgccagccatctgttgtttgcccctcccccttgcct |
| | tccttgaccctggaaggtgccactcccactgtcctttcctaataaaatgaggaaattgcatcacattgtctgagtaggtgtcattctattctggggggggggtg |
| | gggcaggacagcaagggggaggattgggaagacaatagcaggcatgctggggatgcagtgggctctatggcttctgaggcagaaagaaccagctgg |
| | ggctcgagatccactagggccgcaggaacccctagtgatggagttggccactccctctctgcgcgctcgctcgctcactgaggccgggcgaccaaaggt |
| | cgcccgacgcccgggctttgcccgggcggcctcagtgagcgagcgagcgcgcag |
| 31 | ctgcgcgctcgctcgctcactgaggccgcccgggcaaagcccgggcggcctcagtgagcgagcgagcgcgcagagagggagtggccaactccatca |
| | ctaggggttcctgcggcctagtaggctcagaggcacacaggagtttctgggctcaccctgcccccttccaacccctcagttcccatcctccagcagctgttt |
| | gtgtgctgcctctgaagtccacactgaacaaacttcagcctactcatgtccctaaaatgggcaaacattgcaagcagcaaacagcaaacacacagccctcc |
| | ctgcctgctgaccttggagctggggcagaggtcagagacctctctgggcccatgccacctccaacatccactcgaccccttggaatttcggtggagagga |
| | gcagaggttgtcctggcgtggtttaggtagtgtgagaggggtacccggggatcttgctaccagtggaacagccactaaggattctgcagtgagagcagag |
| | ggccagctaagtggtactctcccagagactgtctgactcacgccaccccctccaccttggacacaggacgctgtggtttctgagccaggtacaatgactcct |
| | ttcggtaagtgcagtggaagctgtacactgcccaggcaaagcgtccgggcagcgtaggcgggcgactcagatcccagccagtggacttagcccctgttt |
| | gctcctccgataactggggtgaccttggttaatattcaccagcagcctcccccgttgcccctctggatccactgcttaaatacggacgaggacagggccctg |
| | tctcctcagcttcaggcaccaccactgacctgggacagtgaatagatcctgagaacttcagggtgagtctatgggacccttgatgttttctttccccttcttttct |
| | atggttaagttcatgtcataggaaggggagaagtaacagggtacacatattgaccaaatcagggtaattttgcatttgtaattttaaaaaatgctttcttcttttaat |
| | atacttttttgtttatcttatttctaatactttccctaatctctttctttcagggcaataatgatacaatgtatcatgcctctttgcaccattctaaagaataacagtgataa |
| | tttctgggttaaggcaatagcaatatttctgcatataaatatttctgcatataaattgtaactgatgtaagaggtttcatattgctaatagcagctacaatccagcta |
| | ccattctgcttttattttctggttgggataaggctggattattctgagtccaagctaggcccttttgctaatcttgttcatacctcttatcttcctcccacagctcctgg |
| | gcaacctgctggtctctctgctggcccatcactttggcaaagcacgcgtgccaccatggcctccaggctgaccctgctgaccctcctgctgctgctgctggc |
| | tggggatagagcctcctcaaatgggtccttctgcccaggacctgttactctctgctctgacttggagagtcattcaacagaggccgtgttgggggatgctttg |
| | gtagatttctccctgaagctctaccacgccttctcagcaatgaagaaggtggagaccaacatggccttttccccattcagcatcgccagcctccttacccagg |
| | tcctgctcggggctggggagaacaccaaaacaaacctggagagcatcctctcttaccccaaggacttcacctgtgtccaccaggccctgaagggcttcac |
| | gaccaaaggtgtcacctcagtctctcagattttccacagcccagacctggccataagggacacctttgtgaatgcctctcggaccctgtacagcagcagcc |
| | ccagagtcctaagcaacaacagtgacgccaacttggagctcatcaacacctgggtggccaagaacaccaacaacaagatcagccggctgctagacagt |
| | ctgccctccgatacccgccttgtcctcctcaatgctatctacctgagtgccaagtggaagacaacatttgatcccaagaaaaccagaatggaaccctttcactt |
| | caaaaactcagttataaaagtgcccatgatgaatagcaagaagtaccctgtggcccatttcattgaccaaactttgaaagccaaggtggggcagctgcagct |
| | ctcccacaatctgagtttggtgatcctggtaccccagaacctgaaacatcgtcttgaagacatggaacaggctctcagcccttctgttttcaaggccatcatgg |
| | agaaactggagatgtccaagttccagcccactctcctaacactaccccgcatcaaagtgacgaccagccaggatatgctctcaatcatggagaaattggaa |
| | ttcttcgatttttcttatgaccttaacctgtgtgggctgacagaggaccctgatcttcaggtttctgcgatgcagcaccagacagtgctggaactgacagagact |
| | ggggtggaggcggctgcagcctccgccatctctgtggcccgcaccctgctggtctttgaagtgcagcagcccttcctcttcgtgctctgggaccagcagca |
| | caagttccctgtcttcatggggcgagtatatgaccccagggcctgaagatctagagctgaattcctgcagccagggggatcagcctctactgtgccttctagt |
| | tgccagccatctgttgtttgcccctcccccttgccttccttgaccctggaaggtgccactcccactgtcctttcctaataaaatgaggaaattgcatcacattgtc |
| | tgagtaggtgtcattctattctggggggtggggtggggcaggacagcaagggggaggattgggaagacaatagcaggcatgctggggatgcagtgggc |
| | tctatggcttctgaggcagaaagaaccagctggggctcgagatccactagggccgcaggaacccctagtgatggagttggccactccctctctgcgcgct |
| | cgctcgctcactgaggccgggcgaccaaaggtcgcccgacgcccgggctttgcccgggcggcctcagtgagcgagcgagcgcgcag |
| 32 | ctgcgcgctcgctcgctcactgaggccgcccgggcaaagcccgggcggcctcagtgagcgagcgagcgcgcagagagggagtggccaactccatca |
| | ctaggggttcctgcggcctagtactaggctcagaggcacacaggagtttctgggctcaccctgcccccttccaacccctcagttcccatcctccagcagctg |
| | tttgtgtgctgcctctgaagtccacactgaacaaacttcagcctactcatgtccctaaaatgggcaaacattgcaagcagcaaacagcaaacacacagccct |
| | ccctgcctgctgaccttggagctggggcagaggtcagagacctctctgggcccatgccacctccaacatccacttgaccccttggaattttggtggagagg |
| | agcagaggttgtcctggtgtggtttaggtagtgtgagaggggtacctggggatcttgctaccagtggaacagccactaaggattctgcagtgagagcagag |
| | ggccagctaagtggtactctcccagagactgtctgactcagccaccccctccaccttggacacaggatgctgtggtttctgagccaggtacaatgactccttt |
| | ggtaagtgcagtggaagctgtacactgcccaggcaaaggtctgggcaggtagggggtgactcagatcccagccagtggacttagcccctgtttgctcctc |
| | tgataactggggtgaccttggttaatattcaccagcagcctcccctgttgcccctctggatccactgcttaaatatggatgaggacagggccctgtctcctcag |
| | cttcaggcaccaccactgacctgggacagtgaatagatcttgagaacttcagggtgagtctatgggacccttgatgttttctttccccttcttttctatggttaagt |
| | tcatgtcataggaaggggagaagtaacagggtacacatattgaccaaatcagggtaattttgcatttgtaattttaaaaaatgctttcttcttttaatatacttttttgt |
| | ttatcttatttctaatactttccctaatctctttctttcagggcaataatgatacaatgtatcatgcctctttgcaccattctaaagaataacagtgataatttctgggtta |
| | aggcaatagcaatatttctgcatataaatatttctgcatataaattgtaactgatgtaagaggtttcatattgctaatagcagctacaatccagctaccattctgcttt |
| | tattttctggttgggataaggctggattattctgagtccaagctaggcccttttgctaatcttgttcatacctcttatcttcctcccacagctcctgggcaacctgct |
| | ggtctctctgctggcccatcactttggcaaagcactagtgccaccatggcctctaggctgactctgctgactctgctgctcctgctgctggctggggacagg |
| | gccagctctaaccccaatgctacttctagctcctctcaggaccctgagagcctgcaggacaggggggagggcaaggtggccaccactgtgatctctaaga |
| | tgctgtttgtggagcccatcctggaggtgagcagcctgcccaccaccaacagcaccaccaactctgccactaagatcactgccaacaccactgatgagcc |
| | caccacccagcccactactgagcccaccacccagcctactatccagcccacccagcccactacccagctgcccactgacagccctacccagcccacca |
| | ctggcagcttctgccctgggcctgtgaccctgtgctctgacctggagagccattctactgaggctgtgctgggggatgccctggtggacttctctctgaagct |
| | gtaccatgctttctctgccatgaagaaggtggagactaacatggcttttagccccttcagcattgctagcctgctgacccaggtgctgctgggggctgggga |
| | gaacactaagaccaacctggaatctatcctgagctaccccaaggacttcacctgtgtgcaccaggccctgaagggcttcaccaccaagggggtgacctct |
| | gtgagccagatcttccacagccctgacctggccatcagggatacttttgtgaatgccagcagaaccctgtactcttctagccccagggtgctgagcaataatt |
| | ctgatgctaacctggagctgatcaatacctgggggctaagaataccaacaacaagattagcaggctgctggactctctgccttctgataccaggctggtgc |
| | tgctgaatgccatttacctgtctgccaagtggaagaccacttttgaccctaagaagactaggatggagcctttccacttcaagaactctgtcattaaggtgccc |
| | atgatgaacagcaagaagtatcctgtggcccactttattgaccagactctgaaggccaaggtgggccagctgcagctgagccataacctgagcctggtgat |
| | cctggtgccccagaacctgaagcataggctggaggacatggagcaggctctgagcccctctgtgttcaaggctattatggagaagctggagatgagcaa |
| | gttccagcccactctgctgaccctgcccagaatcaaggtgaccacctctcaggacatgctgagcatcatggaaaagctggagttctttgacttttcttatgacc |
| | tgaatctgtgtggcctgactgaggatcctgatctgcaggtgtctgccatgcagcaccagactgtgctggagctgactgagactggggtggaggctgctgct |
| | gcttctgccatctctgtggccaggaccctgctggtgtttgaggtgcagcagcccttcctgtttgtgctgtgggaccagcagcacaagtttcctgtgttcatggg |
| | cagggtgtatgaccccagagcctgacatctagagctgaattcctgcagccagggggatcagcctctactgtgccttctagttgccagccatctgttgtttgcc |
| | cctcccccttgccttccttgaccctggaaggtgccactcccactgtcctttcctaataaaatgaggaaattgcatcacattgtctgagtaggtgtcattctattctg |
| | gggggtggggtggggcaggacagcaagggggaggattgggaagacaatagcaggcatgctggggatgcagtgggctctatggcttctgaggcagaa |
| | agaaccagctggggctcgagatccactagggccgcaggaacccctagtgatggagttggccactccctctctgcgcgctcgctcgctcactgaggccgg |
| | gcgaccaaaggtcgcccgacgcccgggctttgcccgggcggcctcagtgagcgagcgagcgcgcag |
| 33 | ctgcgcgctcgctcgctcactgaggccgcccgggcaaagcccgggcggcctcagtgagcgagcgagcgcgcagagagggagtggccaactccatca |
| | ctaggggttcctgcggcctagtactaggctcagaggcacacaggagtttctgggctcaccctgcccccttccaacccctcagttcccatcctccagcagctg |
| | tttgtgtgctgcctctgaagtccacactgaacaaacttcagcctactcatgtccctaaaatgggcaaacattgcaagcagcaaacagcaaacacacagccct |
| | ccctgcctgctgaccttggagctggggcagaggtcagagacctctctgggcccatgccacctccaacatccacttgaccccttggaattttggtggagagg |
| | agcagaggttgtcctggtgtggtttaggtagtgtgagaggggtacctggggatcttgctaccagtggaacagccactaaggattctgcagtgagagcagag |
| | ggccagctaagtggtactctcccagagactgtctgactcagccaccccctccaccttggacacaggatgtgtggtttctgagccaggtacaatgactccttt |
| | ggtaagtgcagtggaagctgtacactgcccaggcaaaggtctgggcaggtagggggtgactcagatcccagccagtggacttagcccctgtttgctcctc |
| | tgataactggggtgaccttggttaatattcaccagcagcctcccctgttgcccctctggatccactgcttaaatatggatgaggacagggccctgtctcctcag |
| | cttcaggcaccaccactgacctgggacagtgaatagatcttgagaacttcagggtgagtctatgggacccttgatgttttctttccccttcttttctatggttaagt |
| | tcatgtcataggaaggggagaagtaacagggtacacatattgaccaaatcagggtaattttgcatttgtaattttaaaaaatgctttcttcttttaatatacttttttgt |
| | ttatcttatttctaatactttccctaatctcttttttcagggcaataatgatacaatgtatcatgcctctttgcaccattctaaagaataacagtgataatttctgggtta |
| | aggcaatagcaatatttctgcatataaatatttctgcatataaattgtaactgatgtaagaggtttcatattgctaatagcagctacaatccagctaccattctgcttt |
| | tattttctggttgggataaggctggattattctgagtccaagctaggcccttttgctaatcttgttcatacctcttatcttcctcccacagctcctgggcaacctgct |
| | ggtctctctgctggcccatcactttggcaaagcactagtgccaccatggctagcaggctgaccctgctgaccctgctgctcctgctgctggctggggacag |
| | ggcctctagcaatcccaatgccacctctagctctagccaggatcctgagagcctgcaggacaggggggagggcaaggtggccaccactgtgatcagca |
| | agatgctgtttgtggagcccattctggaggtgtcttctctgcccaccaccaatagcaccactaattctgccaccaagatcactgctaacaccactgatgagcc |
| | caccactcagcctaccactgagcccaccacccagcccactatccagcccacccagcccaccacccagctgcctactgacagccctacccagcccactac |
| | tgggagcttctgccctggccctgtgaccctgtgctctgacctggagagccacagcactgaggctgtgctgggggatgccctggtggacttcagcctgaag |
| | ctgtaccatgccttttctgccatgaagaaggtggagaccaacatggcctttagccctttcagcattgccagcctgctgactcaggtgctgctgggggctggg |
| | gagaacaccaagaccaacctggagagcatcctgagctaccccaaggacttcacttgtgtgcaccaggccctgaagggcttcactaccaagggggtgact |
| | tctgtgagccagatcttccacagccctgacctggccatcagggatacttttgtgaatgccagcaggaccctgtacagcagcagccccagggtgctgagca |
| | acaactctgatgctaacctggagctgatcaatacttgggtggccaagaacaccaacaacaagatttctaggctgctggactctctgccctctgacactaggct |
| | ggtgctgctgaatgccatctacctgtctgccaagtggaagaccacctttgatcccaagaagactaggatggagcccttccacttcaagaactctgtgatcaa |
| | ggtgcccatgatgaacagcaagaagtaccctgtggcccatttcattgaccagaccctgaaggccaaggtggggcagctgcagctgagccacaatctgag |
| | cctggtgattctggtgccccagaatctgaagcacagactggaggacatggagcaggctctgtctccctctgtgttcaaggccatcatggagaagctggaga |
| | tgagcaagttccagcccactctgctgactctgcctaggatcaaggtgaccaccagccaggacatgctgagcattatggagaagctggagttctttgacttca |
| | gctatgacctgaacctgtgtggcctgactgaggaccctgatctgcaggtgtctgccatgcagcaccagactgtgctggagctgactgagactggggtgga |
| | ggctgctgctgcctctgctatttctgtggccaggaccctgctggtgtttgaggtgcagcagcccttcctgtttgtgctgtgggaccagcagcacaagtttcctg |
| | tgttcatggggagggtgtatgaccccagggcctgacatctagagctgaattcctgcagccagggggatcagcctctactgtgccttctagttgccagccatc |
| | tgttgtttgcccctcccccttgccttccttgaccctggaaggtgccactcccactgtcctttcctaataaaatgaggaaattgcatcacattgtctgagtaggtgt |
| | cattctattctggggggtggggggggcaggacagcaagggggaggattgggaagacaatagcaggcatgctggggatgcagtgggctctatggcttct |
| | gaggcagaaagaaccagctggggctcgagatccactagggccgcaggaacccctagtgatggagttggccactccctctctgcgcgctcgctcgctcac |
| | tgaggccgggcgaccaaaggtcgcccgacgcccgggctttgcccgggcggcctcagtgagcgagcgagcgcgcag |
| 34 | ctgcgcgctcgctcgctcactgaggccgcccgggcaaagcccgggcggcctcagtgagcgagcgagcgcgcagagagggagtggccaactccatca |
| | ctaggggttcctgcggcctagtactaggctcagaggcacacaggagtttctgggctcaccctgcccccttccaacccctcagttcccatcctccagcagctg |
| | tttgtgtgctgcctctgaagtccacactgaacaaacttcagcctactcatgtccctaaaatgggcaaacattgcaagcagcaaacagcaaacacacagccct |
| | ccctgcctgctgaccttggagctggggcagaggtcagagacctctctgggcccatgccacctccaacatccactcgaccccttggaatttcggtggagag |
| | gagcagaggttgtcctggcgggtttaggtagtgtgagagggaggctcagaggcacacaggagtttctgggctcaccctgcccccttccaacccctcagtt |
| | cccatcctccagcagctgtttgtgtgctgcctctgaagtccacactgaacaaacttcagcctactcatgtccctaaaatgggcaaacattgcaagcagcaaac |
| | agcaaacacacagccctccctgcctgctgaccttggagctggggcagaggtcagagacctctctgggcccatgccacctccaacatccactcgacccctt |
| | ggaatttcggtggagaggagcagaggttgtcctggcgtggtttaggtagtgtgagaggggtacccggggatcttgctaccagtggaacagccactaagga |
| | ttctgcagtgagagcagagggccagctaagtggtactctcccagagactgtctgactcacgccaccccctccaccttggacacaggacgctgtggtttctg |
| | agccaggtacaatgactcctttcggtaagtgcagtggaagctgtacactgcccaggcaaagcgtccgggcagcgtaggcgggcgactcagatcccagc |
| | cagtggacttagcccctgtttgctcctccgataactggggtgaccttggttaatattcaccagcagcctcccccgttgcccctctggatccactgcttaaatac |
| | ggacgaggacagggccctgtctcctcagcttcaggcaccaccactgacctgggacagtgaatagatcttgagaacttcagggtgagtctatgggaccctt |
| | gatgttttctttccccttcttttctatggttaagttcatgtcataggaaggggagaagtaacagggtacacatattgaccaaatcagggtaattttgcatttgtaattt |
| | taaaaaatgctttcttcttttaatatacttttttgtttatcttatttctaatactttccctaatctcttttttcagggcaataatgatacaatgtatcatgcctctttgcacca |
| | ttctaaagaataacagtgataatttctgggttaaggcaatagcaatatttctgcatataaatatttctgcatataaattgtaactgatgtaagaggtttcatattgcta |
| | atagcagctacaatccagctaccattctgcttttattttctggttgggataaggctggattattctgagtccaagctaggcccttttgctaatcttgttcatacctctt |
| | atcttcctcccacagctcctgggcaacctgctggtctctctgctggcccatcactttggcaaagcactagtgccaccatggcctctaggctgactctgctgact |
| | ctgctgctcctgctgctggctggggacagggccagctctaaccccaatgctacttctagctcctctcaggaccctgagagcctgcaggacaggggggag |
| | ggcaaggtggccaccactgtgatctctaagatgctgtttgtggagcccatcctggaggtgagcagcctgcccaccaccaacagcaccaccaactctgcca |
| | ctaagatcactgccaacaccactgatgagcccaccacccagcccactactgagcccaccacccagcctactatccagcccacccagcccactacccagc |
| | tgcccactgacagccctacccagcccaccactggcagcttctgccctgggcctgtgaccctgtgctctgacctggagagccattctactgaggctgtgctg |
| | ggggatgccctggtggacttctctctgaagctgtaccatgctttctctgccatgaagaaggtggagactaacatggcttttagccccttcagcattgctagcct |
| | gctgacccaggtgctgctgggggctggggagaacactaagaccaacctggaatctatcctgagctaccccaaggacttcacctgtgtgcaccaggccct |
| | gaagggcttcaccaccaagggggtgacctctgtgagccagatcttccacagccctgacctggccatcagggatacttttgtgaatgccagcagaaccctgt |
| | actcttctagccccagggtgctgagcaataattctgatgctaacctggagctgatcaatacctgggtggctaagaataccaacaacaagattagcaggctgc |
| | tggactctctgccttctgataccaggctggtgctgctgaatgccatttacctgtctgccaagtggaagaccacttttgaccctaagaagactaggatggagcct |
| | ttccacttcaagaactctgtcattaaggtgcccatgatgaacagcaagaagtatcctgtggcccactttattgaccagactctgaaggccaaggtgggccag |
| | ctgcagctgagccataacctgagcctggtgatcctggtgccccagaacctgaagcataggctggaggacatggagcaggctctgagcccctctgtgttca |
| | aggctattatggagaagctggagatgagcaagttccagcccactctgctgaccctgcccagaatcaaggtgaccacctctcaggacatgctgagcatcatg |
| | gaaaagctggagttctttgacttttcttatgacctgaatctgtgtggcctgactgaggatcctgatctgcaggtgtctgccatgcagcaccagactgtgctgga |
| | gctgactgagactggggtggaggctgctgctgcttctgccatctctgtggccaggaccctgctggtgtttgaggtgcagcagcccttcctgtttgtgctgtgg |
| | gaccagcagcacaagtttcctgtgttcatgggcagggtgtatgaccccagagcctgacatctagagctgaattcctgcagccagggggatcagcctctact |
| | gtgccttctagttgccagccatctgttgtttgcccctcccccttgccttccttgaccctggaaggtgccactcccactgtcctttcctaataaaatgaggaaattg |
| | catcacattgtctgagtaggtgtcattctattctggggggtggggggggcaggacagcaagggggaggattgggaagacaatagcaggcatgctgggg |
| | atgcagtgggctctatggcttctgaggcagaaagaaccagctggggctcgagatccactagggccgcaggaacccctagtgatggagttggccactccc |
| | tctctgcgcgctcgctcgctcactgaggccgggcgaccaaaggtcgcccgacgcccgggctttgcccgggcggcctcagtgagcgagcgagcgcgca |
| | g |
| 35 | ctgcgcgctcgctcgctcactgaggccgcccgggcaaagcccgggcggcctcagtgagcgagcgagcgcgcagagagggagtggccaactccatca |
| | ctaggggttcctgcggcctagtactaggctcagaggcacacaggagtttctgggctcaccctgcccccttccaacccctcagttcccatcctccagcagctg |
| | tttgtgtgctgcctctgaagtccacactgaacaaacttcagcctactcatgtccctaaaatgggcaaacattgcaagcagcaaacagcaaacacacagccct |
| | ccctgcctgctgaccttggagctggggcagaggtcagagacctctctgggcccatgccacctccaacatccactcgaccccttggaatttcggtggagag |
| | gagcagaggttgtcctggcgggtttaggtagtgtgagagggaggctcagaggcacacaggagtttctgggctcaccctgcccccttccaacccctcagtt |
| | cccatcctccagcagctgtttgtgtgctgcctctgaagtccacactgaacaaacttcagcctactcatgtccctaaaatgggcaaacattgcaagcagcaaac |
| | agcaaacacacagccctccctgcctgctgaccttggagctggggcagaggtcagagacctctctgggcccatgccacctccaacatccactcgacccctt |
| | ggaatttcggtggagaggagcagaggttgtcctggcgtggtttaggtagtgtgagagggaggctcagaggcacacaggagtttctgggctcaccctgccc |
| | ccttccaacccctcagttcccatcctccagcagctgtttgtgtgctgcctctgaagtccacactgaacaaacttcagcctactcatgtccctaaaatgggcaaa |
| | cattgcaagcagcaaacagcaaacacacagccctccctgcctgctgaccttggagctggggcagaggtcagagacctctctgggcccatgccacctcca |
| | acatccactcgaccccttggaatttcggtggagaggagcagaggttgtcctggcgtggtttaggtagtgtgagagggaggctcagaggcacacaggagtt |
| | tctgggctcaccctgcccccttccaacccctcagttcccatcctccagcagctgtttgtgtgctgcctctgaagtccacactgaacaaacttcagcctactcat |
| | gtccctaaaatgggcaaacattgcaagcagcaaacagcaaacacacagccctccctgcctgctgaccttggagctggggcagaggtcagagacctctct |
| | gggcccatgccacctccaacatccactcgaccccttggaatttcggtggagaggagcagaggttgtcctggcgtggtttaggtagtgtgagaggggtacc |
| | cggggatcttgctaccagtggaacagccactaaggattctgcagtgagagcagagggccagctaagtggtactctcccagagactgtctgactcacgcca |
| | ccccctccaccttggacacaggacgctgtggtttctgagccaggtacaatgactcctttcggtaagtgcagtggaagctgtacactgcccaggcaaagcgt |
| | ccgggcagcgtaggcgggcgactcagatcccagccagtggacttagcccctgtttgctcctccgataactggggtgaccttggttaatattcaccagcagc |
| | ctcccccgttgcccctctggatccactgcttaaatacggacgaggacagggccctgtctcctcagcttcaggcaccaccactgacctgggacagtgaatag |
| | atcttgagaacttcagggtgagtctatgggacccttgatgttttctttccccttcttttctatggttaagttcatgtcataggaaggggagaagtaacagggtaca |
| | catattgaccaaatcagggtaattttgcatttgtaattttaaaaaatgctttcttcttttaatatacttttttgtttatcttatttctaatactttccctaatctctttctttcagg |
| | gcaataatgatacaatgtatcatgcctctttgcaccattctaaagaataacagtgataatttctgggttaaggcaatagcaatatttctgcatataaatatttctgca |
| | tataaattgtaactgatgtaagaggtttcatattgctaatagcagctacaatccagctaccattctgcttttattttctggttgggataaggctggattattctgagtc |
| | caagctaggcccttttgctaatcttgttcatacctcttatcttcctcccacagctcctgggcaacctgctggtctctctgctggcccatcactttggcaaagcact |
| | agtgccaccatggcctctaggctgactctgctgactctgctgctcctgctgctggctggggacagggccagctctaaccccaatgctacttctagctcctctc |
| | aggaccctgagagcctgcaggacaggggggagggcaaggtggccaccactgtgatctctaagatgctgtttgtggagcccatcctggaggtgagcagc |
| | ctgcccaccaccaacagcaccaccaactctgccactaagatcactgccaacaccactgatgagcccaccacccagcccactactgagcccaccacccag |
| | cctactatccagcccacccagcccactacccagctgcccactgacagccctacccagcccaccactggcagcttctgccctgggcctgtgaccctgtgct |
| | ctgacctggagagccattctactgaggctgtgctgggggatgccctggtggacttctctctgaagctgtaccatgctttctctgccatgaagaaggtggaga |
| | ctaacatggcttttagccccttcagcattgctagcctgctgacccaggtgctgctgggggctggggagaacactaagaccaacctggaatctatcctgagct |
| | accccaaggacttcacctgtgtgcaccaggccctgaagggcttcaccaccaagggggtgacctctgtgagccagatcttccacagccctgacctggccat |
| | cagggatacttttgtgaatgccagcagaaccctgtactcttctagccccagggtgctgagcaataattctgatgctaacctggagctgatcaatacctgggtg |
| | gctaagaataccaacaacaagattagcaggctgctggactctctgccttctgataccaggctggtgctgctgaatgccatttacctgtctgccaagtggaaga |
| | ccacttttgaccctaagaagactaggatggagcctttccacttcaagaactctgtcattaaggtgcccatgatgaacagcaagaagtatcctgtggcccacttt |
| | attgaccagactctgaaggccaaggtgggccagctgcagctgagccataacctgagcctggtgatcctggtgccccagaacctgaagcataggctggag |
| | gacatggagcaggctctgagcccctctgtgttcaaggctattatggagaagctggagatgagcaagttccagcccactctgctgaccctgcccagaatcaa |
| | ggtgaccacctctcaggacatgctgagcatcatggaaaagctggagttctttgacttttcttatgacctgaatctgtgtggcctgactgaggatcctgatctgca |
| | ggtgtctgccatgcagcaccagactgtgctggagctgactgagactggggtggaggctgctgctgcttctgccatctctgtggccaggaccctgctggtgtt |
| | tgaggtgcagcagcccttcctgtttgtgctgtgggaccagcagcacaagtttcctgtgttcatgggcagggtgtatgaccccagagcctgacatctagagct |
| | gaattcctgcagccagggggatcagcctctactgtgccttctagttgccagccatctgttgtttgcccctcccccttgccttccttgaccctggaaggtgccact |
| | cccactgtcctttcctaataaaatgaggaaattgcatcacattgtctgagtaggtgtcattctattctggggggtggggggggcaggacagcaagggggag |
| | gattgggaagacaatagcaggcatgctggggatgcagtgggctctatggcttctgaggcagaaagaaccagctggggctcgagatccactagggccgc |
| | aggaacccctagtgatggagttggccactccctctctgcgcgctcgctcgctcactgaggccgggcgaccaaaggtcgcccgacgcccgggctttgccc |
| | gggcggcctcagtgagcgagcgagcgcgcag |
| 36 | ctgcgcgctcgctcgctcactgaggccgcccgggcaaagcccgggcggcctcagtgagcgagcgagcgcgcagagagggagtggccaactccatca |
| | ctaggggttcctgcggcctagtccggggatcttgctaccagtggaacagccactaaggattctgcagtgagagcagagggccagctaagtggtactctcc |
| | cagagactgtctgactcacgccaccccctccaccttggacacaggacgctgtggtttctgagccaggtacaatgactcctttcggtaagtgcagtggaagct |
| | gtacactgcccaggcaaagcgtccgggcagcgtaggcgggcgactcagatcccagccagtggacttagcccctgtttgctcctccgataactggggtga |
| | ccttggttaatattcaccagcagcctcccccgttgcccctctggatccactgcttaaatacggacgaggacagggccctgtctcctcagcttcaggcaccac |
| | cactgacctgggacagtgaatagatcttgagaacttcagggtgagtctatgggacccttgatgttttctttccccttcttttctatggttaagttcatgtcatagga |
| | aggggagaagtaacagggtacacatattgaccaaatcagggtaattttgcatttgtaattttaaaaaatgctttcttcttttaatatacttttttgtttatcttatttctaa |
| | tactttccctaatctctttctttcagggcaataatgatacaatgtatcatgcctctttgcaccattctaaagaataacagtgataatttctgggttaaggcaatagca |
| | atatttctgcatataaatatttctgcatataaattgtaactgatgtaagaggtttcatattgctaatagcagctacaatccagctaccattctgcttttattttctggttg |
| | ggataaggctggattattctgagtccaagctaggcccttttgctaatcttgttcatacctcttatcttcctcccacagctcctgggcaacctgctggtctctctgct |
| | ggcccatcactttggcaaagcactagtgccaccatggcctctaggctgactctgctgactctgctgctcctgctgctggctggggacagggccagctctaa |
| | ccccaatgctacttctagctcctctcaggaccctgagagcctgcaggacaggggggagggcaaggtggccaccactgtgatctctaagatgctgtttgtgg |
| | agcccatcctggaggtgagcagcctgcccaccaccaacagcaccaccaactctgccactaagatcactgccaacaccactgatgagcccaccacccag |
| | cccactactgagcccaccacccagcctactatccagcccacccagcccactacccagctgcccactgacagccctacccagcccaccactggcagcttct |
| | gccctgggcctgtgaccctgtgctctgacctggagagccattctactgaggctgtgctgggggatgccctggtggacttctctctgaagctgtaccatgcttt |
| | ctctgccatgaagaaggtggagactaacatggcttttagccccttcagcattgctagcctgctgacccaggtgctgctgggggctggggagaacactaaga |
| | ccaacctggaatctatcctgagctaccccaaggacttcacctgtgtgcaccaggccctgaagggcttcaccaccaagggggtgacctctgtgagccagat |
| | cttccacagccctgacctggccatcagggatacttttgtgaatgccagcagaaccctgtactcttctagccccagggtgctgagcaataattctgatgctaac |
| | ctggagctgatcaatacctgggtggctaagaataccaacaacaagattagcaggctgctggactctctgccttctgataccaggctggtgctgctgaatgcc |
| | atttacctgtctgccaagtggaagaccacttttgaccctaagaagactaggatggagcctttccacttcaagaactctgtcattaaggtgcccatgatgaacag |
| | caagaagtatcctgtggcccactttattgaccagactctgaaggccaaggtgggccagctgcagctgagccataacctgagcctggtgatcctggtgcccc |
| | agaacctgaagcataggctggaggacatggagcaggctctgagcccctctgtgttcaaggctattatggagaagctggagatgagcaagttccagcccac |
| | tctgctgaccctgcccagaatcaaggtgaccacctctcaggacatgctgagcatcatggaaaagctggagttctttgacttttcttatgacctgaatctgtgtg |
| | gcctgactgaggatcctgatctgcaggtgtctgccatgcagcaccagactgtgctggagctgactgagactggggggaggctgctgctgcttctgccatc |
| | tctgtggccaggaccctgctggtgtttgaggtgcagcagcccttcctgtttgtgctgtgggaccagcagcacaagtttcctgtgttcatgggcagggtgtatg |
| | accccagagcctgacatctagaaggctcagaggcacacaggagtttctgggctcaccctgcccccttccaacccctcagttcccatcctccagcagctgttt |
| | gtgtgctgcctctgaagtccacactgaacaaacttcagcctactcatgtccctaaaatgggcaaacattgcaagcagcaaacagcaaacacacagccctcc |
| | ctgcctgctgaccttggagctggggcagaggtcagagacctctctgggcccatgccacctccaacatccactcgaccccttggaatttcggtggagagga |
| | gcagaggttgtcctggcgtggtttaggtagtgtgagagggaggctcagaggcacacaggagtttctgggctcaccctgcccccttccaacccctcagttcc |
| | catcctccagcagctgtttgtgtgctgcctctgaagtccacactgaacaaacttcagcctactcatgtccctaaaatgggcaaacattgcaagcagcaaacag |
| | caaacacacagccctccctgcctgctgaccttggagctggggcagaggtcagagacctctctgggcccatgccacctccaacatccactcgaccccttgg |
| | aatttcggtggagaggagcagaggttgtcctggcgtggtttaggtagtgtgagagggtctagagctgaattcctgcagccagggggatcagcctctactgt |
| | gccttctagttgccagccatctgttgtttgcccctcccccttgccttccttgaccctggaaggtgccactcccactgtcctttcctaataaaatgaggaaattgca |
| | tcacattgtctgagtaggtgtcattctattctggggggtggggggggcaggacagcaagggggaggattgggaagacaatagcaggcatgctggggat |
| | gcagtgggctctatggcttctgaggcagaaagaaccagctggggctcgagatccactagggccgcaggaacccctagtgatggagttggccactccctc |
| | tctgcgcgctcgctcgctcactgaggccgggcgaccaaaggtcgcccgacgcccgggctttgcccgggcggcctcagtgagcgagcgagcgcgcag |
| 37 | ctgcgcgctcgctcgctcactgaggccgcccgggcaaagcccgggggcctcagtgagcgagcgagcgcgcagagagggagtggccaactccatca |
| | ctaggggttcctgcggcctagtccggggatcttgctaccagtggaacagccactaaggattctgcagtgagagcagagggccagctaagtggtactctcc |
| | cagagactgtctgactcacgccaccccctccaccttggacacaggacgctgtggtttctgagccaggtacaatgactcctttcggtaagtgcagtggaagct |
| | gtacactgcccaggcaaagcgtccgggcagcgtaggcgggcgactcagatcccagccagtggacttagcccctgtttgctcctccgataactggggtga |
| | ccttggttaatattcaccagcagcctcccccgttgcccctctggatccactgcttaaatacggacgaggacagggccctgtctcctcagcttcaggcaccac |
| | cactgacctgggacagtgaatagatcttgagaacttcagggtgagtctatgggacccttgatgttttctttccccttcttttctatggttaagttcatgtcatagga |
| | aggggagaagtaacagggtacacatattgaccaaatcagggtaattttgcatttgtaattttaaaaaatgctttcttcttttaatatacttttttgtttatcttatttctaa |
| | tactttccctaatctctttctttcagggcaataatgatacaatgtatcatgcctctttgcaccattctaaagaataacagtgataatttctgggttaaggcaatagca |
| | atatttctgcatataaatatttctgcatataaattgtaactgatgtaagaggtttcatattgctaatagcagctacaatccagctaccattctgcttttattttctggttg |
| | ggataaggctggattattctgagtccaagctaggcccttttgctaatcttgttcatacctcttatcttcctcccacagctcctgggcaacctgctggtctctctgct |
| | ggcccatcactttggcaaagcactagtgccaccatggcctctaggctgactctgctgactctgctgctcctgctgctggctggggacagggccagctctaa |
| | ccccaatgctacttctagctcctctcaggaccctgagagcctgcaggacaggggggagggcaaggtggccaccactgtgatctctaagatgctgtttgtgg |
| | agcccatcctggaggtgagcagcctgcccaccaccaacagcaccaccaactctgccactaagatcactgccaacaccactgatgagcccaccacccag |
| | cccactactgagcccaccacccagcctactatccagcccacccagcccactacccagctgcccactgacagccctacccagcccaccactggcagcttct |
| | gccctgggcctgtgaccctgtgctctgacctggagagccattctactgaggctgtgctgggggatgccctggtggacttctctctgaagctgtaccatgcttt |
| | ctctgccatgaagaaggtggagactaacatggcttttagccccttcagcattgctagcctgctgacccaggtgctgctgggggctggggagaacactaaga |
| | ccaacctggaatctatcctgagctaccccaaggacttcacctgtgtgcaccaggccctgaagggcttcaccaccaagggggtgacctctgtgagccagat |
| | cttccacagccctgacctggccatcagggatacttttgtgaatgccagcagaaccctgtactcttctagccccagggtgctgagcaataattctgatgctaac |
| | ctggagctgatcaatacctgggtggctaagaataccaacaacaagattagcaggctgctggactctctgccttctgataccaggctggtgctgctgaatgcc |
| | atttacctgtctgccaagtggaagaccacttttgaccctaagaagactaggatggagcctttccacttcaagaactctgtcattaaggtgcccatgatgaacag |
| | caagaagtatcctgtggcccactttattgaccagactctgaaggccaaggtgggccagctgcagctgagccataacctgagcctggtgatcctggtgcccc |
| | agaacctgaagcataggctggaggacatggagcaggctctgagcccctctgtgttcaaggctattatggagaagctggagatgagcaagttccagcccac |
| | tctgctgaccctgcccagaatcaaggtgaccacctctcaggacatgctgagcatcatggaaaagctggagttctttgacttttcttatgacctgaatctgtgtg |
| | gcctgactgaggatcctgatctgcaggtgtctgccatgcagcaccagactgtgctggagctgactgagactggggtggaggctgctgctgcttctgccatc |
| | tctgtggccaggaccctgctggtgtttgaggtgcagcagcccttcctgtttgtgctgtgggaccagcagcacaagtttcctgtgttcatgggcagggtgtatg |
| | accccagagcctgacatctagaaggctcagaggcacacaggagtttctgggctcaccctgcccccttccaacccctcagttcccatcctccagcagctgttt |
| | gtgtgctgcctctgaagtccacactgaacaaacttcagcctactcatgtccctaaaatgggcaaacattgcaagcagcaaacagcaaacacacagccctcc |
| | ctgcctgctgaccttggagctggggcagaggtcagagacctctctgggcccatgccacctccaacatccactcgaccccttggaatttcggtggagagga |
| | gcagaggttgtcctggcgggtttaggtagtgtgagagggaggctcagaggcacacaggagtttctgggctcaccctgcccccttccaacccctcagttccc |
| | atcctccagcagctgtttgtgtgctgcctctgaagtccacactgaacaaacttcagcctactcatgtccctaaaatgggcaaacattgcaagcagcaaacagc |
| | aaacacacagccctccctgcctgctgaccttggagctggggcagaggtcagagacctctctgggcccatgccacctccaacatccactcgaccccttgga |
| | atttcggtggagaggagcagaggttgtcctggcgtggtttaggtagtgtgagagggaggctcagaggcacacaggagtttctgggctcaccctgccccctt |
| | ccaacccctcagttcccatcctccagcagctgtttgtgtgctgcctctgaagtccacactgaacaaacttcagcctactcatgtccctaaaatgggcaaacatt |
| | gcaagcagcaaacagcaaacacacagccctccctgcctgctgaccttggagctggggcagaggtcagagacctctctgggcccatgccacctccaacat |
| | ccactcgaccccttggaatttcggtggagaggagcagaggttgtcctggcgtggtttaggtagtgtgagagggaggctcagaggcacacaggagtttctg |
| | ggctcaccctgcccccttccaacccctcagttcccatcctccagcagctgtttgtgtgctgcctctgaagtccacactgaacaaacttcagcctactcatgtcc |
| | ctaaaatgggcaaacattgcaagcagcaaacagcaaacacacagccctccctgcctgctgaccttggagctggggcagaggtcagagacctctctgggc |
| | ccatgccacctccaacatccactcgaccccttggaatttcggtggagaggagcagaggttgtcctggcgtggtttaggtagtgtgagagggtctagagctg |
| | aattcctgcagccagggggatcagcctctactgtgccttctagttgccagccatctgttgtttgcccctcccccttgccttccttgaccctggaaggtgccactc |
| | ccactgtcctttcctaataaaatgaggaaattgcatcacattgtctgagtaggtgtcattctattctggggggtggggggggcaggacagcaagggggagg |
| | attgggaagacaatagcaggcatgctggggatgcagtgggctctatggcttctgaggcagaaagaaccagctggggctcgagatccactagggccgca |
| | ggaacccctagtgatggagttggccactccctctctgcgcgctcgctcgctcactgaggccgggcgaccaaaggtcgcccgacgcccgggctttgcccg |
| | ggcggcctcagtgagcgagcgagcgcgcag |
| 38 | ctgcgcgctcgctcgctcactgaggccgcccgggcaaagcccgggcggcctcagtgagcgagcgagcgcgcagagagggagtggccaactccatca |
| | ctaggggttcctgcggcctagtactaggctcagaggcacacaggagtttctgggctcaccctgcccccttccaacccctcagttcccatcctccagcagctg |
| | tttgtgtgctgcctctgaagtccacactgaacaaacttcagcctactcatgtccctaaaatgggcaaacattgcaagcagcaaacagcaaacacacagccct |
| | ccctgcctgctgaccttggagctggggcagaggtcagagacctctctgggcccatgccacctccaacatccactcgaccccttggaatttcggtggagag |
| | gagcagaggttgtcctggcgtggtttaggtagtgtgagaggggtacccggggatcttgctaccagtggaacagccactaaggattctgcagtgagagcag |
| | agggccagctaagtggtactctcccagagactgtctgactcacgccaccccctccaccttggacacaggacgctgtggtttctgagccaggtacaatgact |
| | cctttcggtaagtgcagtggaagctgtacactgcccaggcaaagcgtccgggcagcgtaggcgggcgactcagatcccagccagtggacttagcccctg |
| | tttgctcctccgataactggggtgaccttggttaatattcaccagcagcctcccccgttgcccctctggatccactgcttaaatacggacgaggacagggccc |
| | tgtctcctcagcttcaggcaccaccactgacctgggacagtgaatagatcttgagaacttcagggtgagtctatgggacccttgatgttttctttccccttcttttc |
| | tatggttaagttcatgtcataggaaggggagaagtaacagggtacacatattgaccaaatcagggtaattttgcatttgtaattttaaaaaatgctttcttcttttaa |
| | tatacttttttgtttatcttatttctaatactttccctaatctctttctttcagggcaataatgatacaatgtatcatgcctctttgcaccattctaaagaataacagtgata |
| | atttctgggttaaggcaatagcaatatttctgcatataaatatttctgcatataaattgtaactgatgtaagaggtttcatattgctaatagcagctacaatccagct |
| | accattctgcttttattttctggttgggataaggctggattattctgagtccaagctaggcccttttgctaatcttgttcatacctcttatcttcctcccacagctcctg |
| | ggcaacctgctggtctctctgctggcccatcactttggcaaagcactagtgccaccatggcctctaggctgactctgctgactctgctgctcctgctgctggct |
| | ggggacagggccagctctaaccccaatgctacttctagctcctctcaggaccctgagagcctgcaggacaggggggagggcaaggtggccaccactgt |
| | gatctctaagatgctgtttgtggagcccatcctggaggtgagcagcctgcccaccaccaacagcaccaccaactctgccactaagatcactgccaacacca |
| | ctgatgagcccaccacccagcccactactgagcccaccacccagcctactatccagcccacccagcccactacccagctgcccactgacagccctaccc |
| | agcccaccactggcagcttctgccctgggcctgtgaccctgtgctctgacctggagagccattctactgaggctgtgctgggggatgccctggtggacttct |
| | ctctgaagctgtaccatgctttctctgccatgaagaaggtggagactaacatggcttttagccccttcagcattgctagcctgctgacccaggtgctgctggg |
| | ggctggggagaacactaagaccaacctggaatctatcctgagctaccccaaggacttcacctgtgtgcaccaggccctgaagggcttcaccaccaaggg |
| | ggtgacctctgtgagccagatcttccacagccctgacctggccatcagggatacttttgtgaatgccagcagaaccctgtactcttctagccccagggtgct |
| | gagcaataattctgatgctaacctggagctgatcaatacctgggtggctaagaataccaacaacaagattagcaggctgctggactctctgccttctgatacc |
| | aggctggtgctgctgaatgccatttacctgtctgccaagtggaagaccacttttgaccctaagaagactaggatggagcctttccacttcaagaactctgtcat |
| | taaggtgcccatgatgaacagcaagaagtatcctgtggcccactttattgaccagactctgaaggccaaggtgggccagctgcagctgagccataacctg |
| | agcctggtgatcctggtgccccagaacctgaagcataggctggaggacatggagcaggctctgagcccctctgtgttcaaggctattatggagaagctgg |
| | agatgagcaagttccagcccactctgctgaccctgcccagaatcaaggtgaccacctctcaggacatgctgagcatcatggaaaagctggagttctttgact |
| | tttcttatgacctgaatctgtgtggcctgactgaggatcctgatctgcaggtgtctgccatgcagcaccagactgtgctggagctgactgagactggggtgga |
| | ggctgctgctgcttctgccatctctgtggccaggaccctgctggtgtttgaggtgcagcagcccttcctgtttgtgctgtgggaccagcagcacaagtttcctg |
| | tgttcatgggcagggtgtatgaccccagagcctgacatctagacctgcagtcttcagagggccaccgcagctccagtgccacggcaggaggctgttcctg |
| | aatagcccctgtggtaagggccaggagagtccttccatcctccaaggccctgctaaaggacacagcagccaggaagtcccctgggcccctagctgaag |
| | gacagcctgctccctccgtctctaccaggaatggccttgtcctatggaaggcactgccccatcccaaactaatctaggaatcactgtctaaccactcactgtc |
| | atgaatgtgtacttaaaggatgaggttgagtcataccaaatagtgatttcgatagttcaaaatggtgaaattagcaattctacatgattcagtctaatcaatggat |
| | accgactgtttcccacacaagtctcctgttctcttaagcttactcactgacagcctttcactctccacaaatacattaaagatatggccatcaccaagcccccta |
| | ggatgacaccagacctgagagtctgaagacctggatcctctagagctgaattcctgcagccagggggatcagcctctactgtgccttctagttgccagccat |
| | ctgttgtttgcccctcccccttgccttccttgaccctggaaggtgccactcccactgtcctttcctaataaaatgaggaaattgcatcacattgtctgagtaggtg |
| | tcattctattctggggggtggggggggcaggacagcaagggggaggattgggaagacaatagcaggcatgctggggatgcagtgggctctatggcttc |
| | tgaggcagaaagaaccagctggggctcgagatccactagggccgcaggaacccctagtgatggagttggccactccctctctgcgcgctcgctcgctca |
| | ctgaggccgggcgaccaaaggtcgcccgacgcccgggctttgcccgggcggcctcagtgagcgagcgagcgcgcag |
| 39 | ctgcgcgctcgctcgctcactgaggccgcccgggcaaagcccgggcggcctcagtgagcgagcgagcgcgcagagagggagtggccaactccatca |
| | ctaggggttcctgcggcctagtactaggctcagaggcacacaggagtttctgggctcaccctgcccccttccaacccctcagttcccatcctccagcagctg |
| | tttgtgtgctgcctctgaagtccacactgaacaaacttcagcctactcatgtccctaaaatgggcaaacattgcaagcagcaaacagcaaacacacagccct |
| | ccctgcctgctgaccttggagctggggcagaggtcagagacctctctgggcccatgccacctccaacatccactcgaccccttggaatttcggtggagag |
| | gagcagaggttgtcctggcgtggtttaggtagtgtgagaggggtacccggggatcttgctaccagtggaacagccactaaggattctgcagtgagagcag |
| | agggccagctaagtggtactctcccagagactgtctgactcacgccaccccctccaccttggacacaggacgctgtggtttctgagccaggtacaatgact |
| | cctttcggtaagtgcagtggaagctgtacactgcccaggcaaagcgtccgggcagcgtaggcgggcgactcagatcccagccagtggacttagcccctg |
| | tttgctcctccgataactggggtgaccttggttaatattcaccagcagcctcccccgttgcccctctggatccactgcttaaatacggacgaggacagggccc |
| | tgtctcctcagcttcaggcaccaccactgacctgggacagtgaatagatcttgagaacttcagggtgagtctatgggacccttgatgtttttttccccttcttttc |
| | tatggttaagttcatgtcataggaaggggagaagtaacagggtacacatattgaccaaatcagggtaattttgcatttgtaattttaaaaaatgctttcttcttttaa |
| | tatacttttttgtttatcttatttctaatactttccctaatctctttctttcagggcaataatgatacaatgtatcatgcctctttgcaccattctaaagaataacagtgata |
| | atttctgggttaaggcaatagcaatatttctgcatataaatatttctgcatataaattgtaactgatgtaagaggtttcatattgctaatagcagctacaatccagct |
| | accattctgcttttattttctggttgggataaggctggattattctgagtccaagctaggcccttttgctaatcttgttcatacctcttatcttcctcccacagctcctg |
| | ggcaacctgctggtctctctgctggcccatcactttggcaaagcactagtgccaccatggcctctaggctgactctgctgactctgctgctcctgctgctggct |
| | ggggacagggccagctctaaccccaatgctacttctagctcctctcaggaccctgagagcctgcaggacaggggggagggcaaggtggccaccactgt |
| | gatctctaagatgctgtttgtggagcccatcctggaggtgagcagcctgcccaccaccaacagcaccaccaactctgccactaagatcactgccaacacca |
| | ctgatgagcccaccacccagcccactactgagcccaccacccagcctactatccagcccacccagcccactacccagctgcccactgacagccctaccc |
| | agcccaccactggcagcttctgccctgggcctgtgaccctgtgctctgacctggagagccattctactgaggctgtgctgggggatgccctggtggacttct |
| | ctctgaagctgtaccatgctttctctgccatgaagaaggtggagactaacatggcttttagccccttcagcattgctagcctgctgacccaggtgctgctggg |
| | ggctggggagaacactaagaccaacctggaatctatcctgagctaccccaaggacttcacctgtgtgcaccaggccctgaagggcttcaccaccaaggg |
| | ggtgacctctgtgagccagatcttccacagccctgacctggccatcagggatacttttgtgaatgccagcagaaccctgtactcttctagccccagggtgct |
| | gagcaataattctgatgctaacctggagctgatcaatacctgggtggctaagaataccaacaacaagattagcaggctgctggactctctgccttctgatacc |
| | aggctggtgctgctgaatgccatttacctgtctgccaagtggaagaccacttttgaccctaagaagactaggatggagcctttccacttcaagaactctgtcat |
| | taaggtgcccatgatgaacagcaagaagtatcctgtggcccactttattgaccagactctgaaggccaaggtgggccagctgcagctgagccataacctg |
| | agcctggtgatcctggtgccccagaacctgaagcataggctggaggacatggagcaggctctgagcccctctgtgttcaaggctattatggagaagctgg |
| | agatgagcaagttccagcccactctgctgaccctgcccagaatcaaggtgaccacctctcaggacatgctgagcatcatggaaaagctggagttctttgact |
| | tttcttatgacctgaatctgtgtggcctgactgaggatcctgatctgcaggtgtctgccatgcagcaccagactgtgctggagctgactgagactggggtgga |
| | ggctgctgctgcttctgccatctctgtggccaggaccctgctggtgtttgaggtgcagcagcccttcctgtttgtgctgtgggaccagcagcacaagtttcctg |
| | tgttcatgggcagggtgtatgaccccagagcctgacatctagacctgcagtcttcagagggccactgcagctccagtgccatggcaggaggctgttcctga |
| | atagcccctgtggtaagggccaggagagtccttccatcctccaaggccctgctaaaggacacagcagccaggaagtcccctgggcccctagctgaagg |
| | acagcctgctccctctgtctctaccaggaatggccttgtcctatggaaggcactgccccatcccaaactaatctaggaatcactgtctaaccactcactgtcat |
| | gaatgtgtacttaaaggatgaggttgagtcataccaaatagtgattttgatagttcaaaatggtgaaattagcaattctacatgattcagtctaatcaatggatact |
| | gactgtttcccacacaagtctcctgttctcttaagcttactcactgacagcctttcactctccacaaatacattaaagatatggccatcaccaagccccctaggat |
| | gacaccagacctgagagtctgaagacctggatcctctagagctgaattcctgcagccagggggatcagcctctactgtgccttctagttgccagccatctgt |
| | tgtttgcccctcccccttgccttccttgaccctggaaggtgccactcccactgtcctttcctaataaaatgaggaaattgcatcacattgtctgagtaggtgtcatt |
| | ctattctggggggtggggggggcaggacagcaagggggaggattgggaagacaatagcaggcatgctggggatgcagtgggctctatggcttctgag |
| | gcagaaagaaccagctggggctcgagatccactagggccgcaggaacccctagtgatggagttggccactccctctctgcgcgctcgctcgctcactga |
| | ggccgggcgaccaaaggtcgcccgacgcccgggctttgcccgggcggcctcagtgagcgagcgagcgcgcag |
| 40 | ctgcgcgctcgctcgctcactgaggccgcccgggcaaagcccgggcggcctcagtgagcgagcgagcgcgcagagagggagtggccaactccatca |
| | ctaggggttcctgcggcctagtactaggctcagaggcacacaggagtttctgggctcaccctgcccccttccaacccctcagttcccatcctccagcagctg |
| | tttgtgtgctgcctctgaagtccacactgaacaaacttcagcctactcatgtccctaaaatgggcaaacattgcaagcagcaaacagcaaacacacagccct |
| | ccctgcctgctgaccttggagctggggcagaggtcagagacctctctgggcccatgccacctccaacatccactcgaccccttggaatttcggtggagag |
| | gagcagaggttgtcctggcgtggtttaggtagtgtgagaggggtacccggggatcttgctaccagtggaacagccactaaggattctgcagtgagagcag |
| | agggccagctaagtggtactctcccagagactgtctgactcacgccaccccctccaccttggacacaggacgctgtggtttctgagccaggtacaatgact |
| | cctttcggtaagtgcagtggaagctgtacactgcccaggcaaagcgtccgggcagcgtagggggcgactcagatcccagccagtggacttagcccctg |
| | tttgctcctccgataactggggtgaccttggttaatattcaccagcagcctcccccgttgcccctctggatccactgcttaaatacggacgaggacagggccc |
| | tgtctcctcagcttcaggcaccaccactgacctgggacagtgaatagatcttgagaacttcagggtgagtctatgggacccttgatgttttctttccccttcttttc |
| | tatggttaagttcatgtcataggaaggggagaagtaacagggtacacatattgaccaaatcagggtaattttgcatttgtaattttaaaaaatgctttcttcttttaa |
| | tatacttttttgtttatcttatttctaatactttccctaatctcttttttcagggcaataatgatacaatgtatcatgcctctttgcaccattctaaagaataacagtgata |
| | atttctgggttaaggcaatagcaatatttctgcatataaatatttctgcatataaattgtaactgatgtaagaggtttcatattgctaatagcagctacaatccagct |
| | accattctgcttttattttctggttgggataaggctggattattctgagtccaagctaggcccttttgctaatcttgttcatacctcttatcttcctcccacagctcctg |
| | ggcaacctgctggtctctctgctggcccatcactttggcaaagcactagtgccaccatggcctctaggctgactctgctgactctgctgctcctgctgctggct |
| | ggggacagggccagctctaaccccaatgctacttctagctcctctcaggaccctgagagcctgcaggacaggggggagggcaaggtggccaccactgt |
| | gatctctaagatgctgtttgtggagcccatcctggaggtgagcagcctgcccaccaccaacagcaccaccaactctgccactaagatcactgccaacacca |
| | ctgatgagcccaccacccagcccactactgagcccaccacccagcctactatccagcccacccagcccactacccagctgcccactgacagccctaccc |
| | agcccaccactggcagcttctgccctgggcctgtgaccctgtgctctgacctggagagccattctactgaggctgtgctgggggatgccctggtggacttct |
| | ctctgaagctgtaccatgctttctctgccatgaagaaggtggagactaacatggcttttagccccttcagcattgctagcctgctgacccaggtgctgctggg |
| | ggctggggagaacactaagaccaacctggaatctatcctgagctaccccaaggacttcacctgtgtgcaccaggccctgaagggcttcaccaccaaggg |
| | ggtgacctctgtgagccagatcttccacagccctgacctggccatcagggatacttttgtgaatgccagcagaaccctgtactcttctagccccagggtgct |
| | gagcaataattctgatgctaacctggagctgatcaatacctgggtggctaagaataccaacaacaagattagcaggctgctggactctctgccttctgatacc |
| | aggctggtgctgctgaatgccatttacctgtctgccaagtggaagaccacttttgaccctaagaagactaggatggagcctttccacttcaagaactctgtcat |
| | taaggtgcccatgatgaacagcaagaagtatcctgtggcccactttattgaccagactctgaaggccaaggtgggccagctgcagctgagccataacctg |
| | agcctggtgatcctggtgccccagaacctgaagcataggctggaggacatggagcaggctctgagcccctctgtgttcaaggctattatggagaagctgg |
| | agatgagcaagttccagcccactctgctgaccctgcccagaatcaaggtgaccacctctcaggacatgctgagcatcatggaaaagctggagttctttgact |
| | tttcttatgacctgaatctgtgtggcctgactgaggatcctgatctgcaggtgtctgccatgcagcaccagactgtgctggagctgactgagactggggtgga |
| | ggctgctgctgcttctgccatctctgtggccaggaccctgctggtgtttgaggtgcagcagcccttcctgtttgtgctgtgggaccagcagcacaagtttcctg |
| | tgttcatgggcagggtgtatgaccccagagcctgacatctagaaatcaacctctggattacaaaatttgtgaaagattgactggtattcttaactatgttgctcct |
| | tttacgctatgtggatacgctgctttaatgcctttgtatcatgctattgcttcccgtatggctttcattttctcctccttgtataaatcctggttagttcttgccacggcg |
| | gaactcatcgccgcctgccttgcccgctgctggacaggggctcggctgttgggcactgacaattccgtggtgttctagagctgaattcctgcagccagggg |
| | gatcagcctctactgtgccttctagttgccagccatctgttgtttgcccctcccccttgccttccttgaccctggaaggtgccactcccactgtcctttcctaataa |
| | aatgaggaaattgcatcacattgtctgagtaggtgtcattctattctggggggtggggggggcaggacagcaagggggaggattgggaagacaatagca |
| | ggcatgctggggatgcagtgggctctatggcttctgaggcagaaagaaccagctggggctcgagatccactagggccgcaggaacccctagtgatgga |
| | gttggccactccctctctgcgcgctcgctcgctcactgaggccgggcgaccaaaggtcgcccgacgcccgggctttgcccgggcggcctcagtgagcg |
| | agcgagcgcgcag |
| 41 | ctgcgcgctcgctcgctcactgaggccgcccgggcaaagcccgggcggcctcagtgagcgagcgagcgcgcagagagggagtggccaactccatca |
| | ctaggggttcctgcggcctagtactaggctcagaggcacacaggagtttctgggctcaccctgcccccttccaacccctcagttcccatcctccagcagctg |
| | tttgtgtgctgcctctgaagtccacactgaacaaacttcagcctactcatgtccctaaaatgggcaaacattgcaagcagcaaacagcaaacacacagccct |
| | ccctgcctgctgaccttggagctggggcagaggtcagagacctctctgggcccatgccacctccaacatccactcgaccccttggaatttcggtggagag |
| | gagcagaggttgtcctggcgtggtttaggtagtgtgagaggggtacccggggatcttgctaccagtggaacagccactaaggattctgcagtgagagcag |
| | agggccagctaagtggtactctcccagagactgtctgactcacgccaccccctccaccttggacacaggacgctgtggtttctgagccaggtacaatgact |
| | cctttcggtaagtgcagtggaagctgtacactgcccaggcaaagcgtccgggcagcgtagggggcgactcagatcccagccagtggacttagcccctg |
| | tttgctcctccgataactggggtgaccttggttaatattcaccagcagcctcccccgttgcccctctggatccactgcttaaatacggacgaggacagggccc |
| | tgtctcctcagcttcaggcaccaccactgacctgggacagtgaatagatcttgagaacttcagggtgagtctatgggacccttgatgttttctttccccttcttttc |
| | tatggttaagttcatgtcataggaaggggagaagtaacagggtacacatattgaccaaatcagggtaattttgcatttgtaattttaaaaaatgctttcttcttttaa |
| | tatacttttttgtttatcttatttctaatactttccctaatctcttttttcagggcaataatgatacaatgtatcatgcctctttgcaccattctaaagaataacagtgata |
| | atttctgggttaaggcaatagcaatatttctgcatataaatatttctgcatataaattgtaactgatgtaagaggtttcatattgctaatagcagctacaatccagct |
| | accattctgcttttattttctggttgggataaggctggattattctgagtccaagctaggcccttttgctaatcttgttcatacctcttatcttcctcccacagctcctg |
| | ggcaacctgctggtctctctgctggcccatcactttggcaaagcactagtgccaccatggcctctaggctgactctgctgactctgctgctcctgctgctggct |
| | ggggacagggccagctctaaccccaatgctacttctagctcctctcaggaccctgagagcctgcaggacaggggggagggcaaggtggccaccactgt |
| | gatctctaagatgctgtttgtggagcccatcctggaggtgagcagcctgcccaccaccaacagcaccaccaactctgccactaagatcactgccaacacca |
| | ctgatgagcccaccacccagcccactactgagcccaccacccagcctactatccagcccacccagcccactacccagctgcccactgacagccctaccc |
| | agcccaccactggcagcttctgccctgggcctgtgaccctgtgctctgacctggagagccattctactgaggctgtgctgggggatgccctggtggacttct |
| | ctctgaagctgtaccatgctttctctgccatgaagaaggtggagactaacatggcttttagccccttcagcattgctagcctgctgacccaggtgctgctggg |
| | ggctggggagaacactaagaccaacctggaatctatcctgagctaccccaaggacttcacctgtgtgcaccaggccctgaagggcttcaccaccaaggg |
| | ggtgacctctgtgagccagatcttccacagccctgacctggccatcagggatacttttgtgaatgccagcagaaccctgtactcttctagccccagggtgct |
| | gagcaataattctgatgctaacctggagctgatcaatacctgggtggctaagaataccaacaacaagattagcaggctgctggactctctgccttctgatacc |
| | aggctggtgctgctgaatgccatttacctgtctgccaagtggaagaccacttttgaccctaagaagactaggatggagcctttccacttcaagaactctgtcat |
| | taaggtgcccatgatgaacagcaagaagtatcctgtggcccactttattgaccagactctgaaggccaaggtgggccagctgcagctgagccataacctg |
| | agcctggtgatcctggtgccccagaacctgaagcataggctggaggacatggagcaggctctgagcccctctgtgttcaaggctattatggagaagctgg |
| | agatgagcaagttccagcccactctgctgaccctgcccagaatcaaggtgaccacctctcaggacatgctgagcatcatggaaaagctggagttctttgact |
| | tttcttatgacctgaatctgtgtggcctgactgaggatcctgatctgcaggtgtctgccatgcagcaccagactgtgctggagctgactgagactggggtgga |
| | ggctgctgctgcttctgccatctctgtggccaggaccctgctggtgtttgaggtgcagcagcccttcctgtttgtgctgtgggaccagcagcacaagtttcctg |
| | tgttcatgggcagggtgtatgaccccagagcctgacatctagaaatcaacctctggattacaaaatttgtgaaagattgactggtattcttaactatgttgctcct |
| | tttatgctatgtggatatgctgctttaatgcctttgtatcatgctattgcttcctgtatggctttcattttctcctccttgtataaatcctggttagttcttgccatggtgga |
| | actcattgctgcctgccttgcctgctgctggacaggggcttggctgttgggcactgacaattctgtggtgttctagagctgaattcctgcagccagggggatc |
| | agcctctactgtgccttctagttgccagccatctgttgtttgcccctcccccttgccttccttgaccctggaaggtgccactcccactgtcctttcctaataaaatg |
| | aggaaattgcatcacattgtctgagtaggtgtcattctattctggggggtggggggggcaggacagcaagggggaggattgggaagacaatagcaggc |
| | atgctggggatgcagtgggctctatggcttctgaggcagaaagaaccagctggggctcgagatccactagggccgcaggaacccctagtgatggagttg |
| | gccactccctctctgcgcgctcgctcgctcactgaggccgggcgaccaaaggtcgcccgacgcccgggctttgcccgggcggcctcagtgagcgagc |
| | gagcgcgcag |
| 42 | ctgcgcgctcgctcgctcactgaggccgcccgggcaaagcccgggcggcctcagtgagcgagcgagcgcgcagagagggagtggccaactccatca |
| | ctaggggttcctgcggcctagtactaggctcagaggcacacaggagtttctgggctcaccctgcccccttccaacccctcagttcccatcctccagcagctg |
| | tttgtgtgctgcctctgaagtccacactgaacaaacttcagcctactcatgtccctaaaatgggcaaacattgcaagcagcaaacagcaaacacacagccct |
| | ccctgcctgctgaccttggagctggggcagaggtcagagacctctctgggcccatgccacctccaacatccactcgaccccttggaatttcggtggagag |
| | gagcagaggttgtcctggcgtggtttaggtagtgtgagaggggtacccggggatcttgctaccagtggaacagccactaaggattctgcagtgagagcag |
| | agggccagctaagtggtactctcccagagactgtctgactcacgccaccccctccaccttggacacaggacgctgtggtttctgagccaggtacaatgact |
| | cctttcggtaagtgcagtggaagctgtacactgcccaggcaaagcgtccgggcagcgtaggcgggcgactcagatcccagccagtggacttagcccctg |
| | tttgctcctccgataactggggtgaccttggttaatattcaccagcagcctcccccgttgcccctctggatccactgcttaaatacggacgaggacagggccc |
| | tgtctcctcagcttcaggcaccaccactgacctgggacagtgaatagatcttgagaacttcagggtgagtctatgggacccttgatgttttctttccccttcttttc |
| | tatggttaagttcatgtcataggaaggggagaagtaacagggtacacatattgaccaaatcagggtaattttgcatttgtaattttaaaaaatgctttcttcttttaa |
| | tatacttttttgtttatcttatttctaatactttccctaatctcttttttcagggcaataatgatacaatgtatcatgcctctttgcaccattctaaagaataacagtgata |
| | atttctgggttaaggcaatagcaatatttctgcatataaatatttctgcatataaattgtaactgatgtaagaggtttcatattgctaatagcagctacaatccagct |
| | accattctgcttttattttctggttgggataaggctggattattctgagtccaagctaggcccttttgctaatcttgttcatacctcttatcttcctcccacagctcctg |
| | ggcaacctgctggtctctctgctggcccatcactttggcaaagcactagtgccaccatggcctctaggctgactctgctgactctgctgctcctgctgctggct |
| | ggggacagggccagctctaaccccaatgctacttctagctcctctcaggaccctgagagcctgcaggacaggggggagggcaaggtggccaccactgt |
| | gatctctaagatgctgtttgtggagcccatcctggaggtgagcagcctgcccaccaccaacagcaccaccaactctgccactaagatcactgccaacacca |
| | ctgatgagcccaccacccagcccactactgagcccaccacccagcctactatccagcccacccagcccactacccagctgcccactgacagccctaccc |
| | agcccaccactggcagcttctgccctgggcctgtgaccctgtgctctgacctggagagccattctactgaggctgtgctgggggatgccctggtggacttct |
| | ctctgaagctgtaccatgctttctctgccatgaagaaggtggagactaacatggcttttagccccttcagcattgctagcctgctgacccaggtgctgctggg |
| | ggctggggagaacactaagaccaacctggaatctatcctgagctaccccaaggacttcacctgtgtgcaccaggccctgaagggcttcaccaccaaggg |
| | ggtgacctctgtgagccagatcttccacagccctgacctggccatcagggatacttttgtgaatgccagcagaaccctgtactcttctagccccagggtgct |
| | gagcaataattctgatgctaacctggagctgatcaatacctgggtggctaagaataccaacaacaagattagcaggctgctggactctctgccttctgatacc |
| | aggctggtgctgctgaatgccatttacctgtctgccaagtggaagaccacttttgaccctaagaagactaggatggagcctttccacttcaagaactctgtcat |
| | taaggtgcccatgatgaacagcaagaagtatcctgtggcccactttattgaccagactctgaaggccaaggtgggccagctgcagctgagccataacctg |
| | agcctggtgatcctggtgccccagaacctgaagcataggctggaggacatggagcaggctctgagcccctctgtgttcaaggctattatggagaagctgg |
| | agatgagcaagttccagcccactctgctgaccctgcccagaatcaaggtgaccacctctcaggacatgctgagcatcatggaaaagctggagttctttgact |
| | tttcttatgacctgaatctgtgtggcctgactgaggatcctgatctgcaggtgtctgccatgcagcaccagactgtgctggagctgactgagactggggtgga |
| | ggctgctgctgcttctgccatctctgtggccaggaccctgctggtgtttgaggtgcagcagcccttcctgtttgtgctgtgggaccagcagcacaagtttcctg |
| | tgttcatgggcagggtgtatgaccccagagcctgacatctagaaatcaacctctggattacaaaatttgtgaaagattgactggtattcttaactatgttgctcct |
| | tttacgctatgtggatacgctgctttaatgcctttgtatcatgctattgcttcccgtatggctttcattttctcctccttgtataaatcctggttgctgtctctttatgagg |
| | agttgtggcccgttgtcaggcaacgtggcgtggtgtgcactgtgtttgctgacgcaacccccactggttggggcattgccaccacctgtcagctcctttccg |
| | ggactttcgctttccccctccctattgccacggcggaactcatcgccgcctgccttgcccgctgctggacaggggctcggctgttgggcactgacaattccg |
| | tggtgttgtcggggaagctgacgtcctttccatggctgctcgcctgtgttgccacctggattctgcgcgggacgtccttctgctacgtcccttcggccctcaat |
| | ccagcggaccttccttcccgcggcctgctgccggctctgcggcctcttccgcgtcttcgccttcgccctcagacgagtcggatctccctttgggccgcctcc |
| | ccgctctagagctgaattcctgcagccagggggatcagcctctactgtgccttctagttgccagccatctgttgtttgcccctcccccttgccttccttgaccct |
| | ggaaggtgccactcccactgtcctttcctaataaaatgaggaaattgcatcacattgtctgagtaggtgtcattctattctggggggtggggggggcaggac |
| | agcaagggggaggattgggaagacaatagcaggcatgctggggatgcagtgggctctatggcttctgaggcagaaagaaccagctggggctcgagat |
| | ccactagggccgcaggaacccctagtgatggagttggccactccctctctgcgcgctcgctcgctcactgaggccgggcgaccaaaggtcgcccgacg |
| | cccgggctttgcccgggcggcctcagtgagcgagcgagcgcgcag |
| 43 | ctgcgcgctcgctcgctcactgaggccgcccgggcaaagcccgggcggcctcagtgagcgagcgagcgcgcagagagggagtggccaactccatca |
| | ctaggggttcctgcggcctagtactaggctcagaggcacacaggagtttctgggctcaccctgcccccttccaacccctcagttcccatcctccagcagctg |
| | tttgtgtgctgcctctgaagtccacactgaacaaacttcagcctactcatgtccctaaaatgggcaaacattgcaagcagcaaacagcaaacacacagccct |
| | ccctgcctgctgaccttggagctggggcagaggtcagagacctctctgggcccatgccacctccaacatccactcgaccccttggaatttcggtggagag |
| | gagcagaggttgtcctggcgtggtttaggtagtgtgagaggggtacccggggatcttgctaccagtggaacagccactaaggattctgcagtgagagcag |
| | agggccagctaagtggtactctcccagagactgtctgactcacgccaccccctccaccttggacacaggacgctgtggtttctgagccaggtacaatgact |
| | cctttcggtaagtgcagtggaagctgtacactgcccaggcaaagcgtccgggcagcgtaggcgggcgactcagatcccagccagtggacttagcccctg |
| | tttgctcctccgataactggggtgaccttggttaatattcaccagcagcctcccccgttgcccctctggatccactgcttaaatacggacgaggacagggccc |
| | tgtctcctcagcttcaggcaccaccactgacctgggacagtgaatagatcttgagaacttcagggtgagtctatgggacccttgatgttttctttccccttcttttc |
| | tatggttaagttcatgtcataggaaggggagaagtaacagggtacacatattgaccaaatcagggtaattttgcatttgtaattttaaaaaatgctttcttcttttaa |
| | tatacttttttgtttatcttatttctaatactttccctaatctctttctttcagggcaataatgatacaatgtatcatgcctctttgcaccattctaaagaataacagtgata |
| | atttctgggttaaggcaatagcaatatttctgcatataaatatttctgcatataaattgtaactgatgtaagaggtttcatattgctaatagcagctacaatccagct |
| | accattctgcttttattttctggttgggataaggctggattattctgagtccaagctaggcccttttgctaatcttgttcatacctcttatcttcctcccacagctcctg |
| | ggcaacctgctggtctctctgctggcccatcactttggcaaagcactagtgccaccatggcctctaggctgactctgctgactctgctgctcctgctgctggct |
| | ggggacagggccagctctaaccccaatgctacttctagctcctctcaggaccctgagagcctgcaggacaggggggagggcaaggtggccaccactgt |
| | gatctctaagatgctgtttgtggagcccatcctggaggtgagcagcctgcccaccaccaacagcaccaccaactctgccactaagatcactgccaacacca |
| | ctgatgagcccaccacccagcccactactgagcccaccacccagcctactatccagcccacccagcccactacccagctgcccactgacagccctaccc |
| | agcccaccactggcagcttctgccctgggcctgtgaccctgtgctctgacctggagagccattctactgaggctgtgctgggggatgccctggtggacttct |
| | ctctgaagctgtaccatgctttctctgccatgaagaaggtggagactaacatggcttttagccccttcagcattgctagcctgctgacccaggtgctgctggg |
| | ggctggggagaacactaagaccaacctggaatctatcctgagctaccccaaggacttcacctgtgtgcaccaggccctgaagggcttcaccaccaaggg |
| | ggtgacctctgtgagccagatcttccacagccctgacctggccatcagggatacttttgtgaatgccagcagaaccctgtactcttctagccccagggtgct |
| | gagcaataattctgatgctaacctggagctgatcaatacctgggtggctaagaataccaacaacaagattagcaggctgctggactctctgccttctgatacc |
| | aggctggtgctgctgaatgccatttacctgtctgccaagtggaagaccacttttgaccctaagaagactaggatggagcctttccacttcaagaactctgtcat |
| | taaggtgcccatgatgaacagcaagaagtatcctgtggcccactttattgaccagactctgaaggccaaggtgggccagctgcagctgagccataacctg |
| | agcctggtgatcctggtgccccagaacctgaagcataggctggaggacatggagcaggctctgagcccctctgtgttcaaggctattatggagaagctgg |
| | agatgagcaagttccagcccactctgctgaccctgcccagaatcaaggtgaccacctctcaggacatgctgagcatcatggaaaagctggagttctttgact |
| | tttcttatgacctgaatctgtgtggcctgactgaggatcctgatctgcaggtgtctgccatgcagcaccagactgtgctggagctgactgagactggggtgga |
| | ggctgctgctgcttctgccatctctgtggccaggaccctgctggtgtttgaggtgcagcagcccttcctgtttgtgctgtgggaccagcagcacaagtttcctg |
| | tgttcatgggcagggtgtatgaccccagagcctgacatctagaaatcaacctctggattacaaaatttgtgaaagattgactggtattcttaactatgttgctcct |
| | tttatgctatgtggatatgctgctttaatgcctttgtatcatgctattgcttcctgtatggctttcattttctcctccttgtataaatcctggttgctgtctctttatgagga |
| | gttgtggcctgttgtcaggcaatgtggtgtggtgtgcactgtgtttgctgatgcaacccccactggttggggcattgccaccacctgtcagctcctttctggga |
| | cttttgctttccccctccctattgccatggtggaactcattgctgcctgccttgcctgctgctggacaggggcttggctgttgggcactgacaattctgtggtgtt |
| | gttggggaagctgatgtcctttccatggctgcttgcctgtgttgccacctggattctgtgtgggatgtccttctgctatgtccctttggccctcaatccagtggac |
| | cttccttcctgtggcctgctgctggctctgtggcctcttctgtgtctttgcctttgccctcagatgagttggatctccctttgggctgcctccctgctctagagctga |
| | attcctgcagccagggggatcagcctctactgtgccttctagttgccagccatctgttgtttgcccctcccccttgccttccttgaccctggaaggtgccactcc |
| | cactgtcctttcctaataaaatgaggaaattgcatcacattgtctgagtaggtgtcattctattctggggggtggggggggcaggacagcaagggggagga |
| | ttgggaagacaatagcaggcatgctggggatgcagtgggctctatggcttctgaggcagaaagaaccagctggggctcgagatccactagggccgcag |
| | gaacccctagtgatggagttggccactccctctctgcgcgctcgctcgctcactgaggccgggcgaccaaaggtcgcccgacgcccgggctttgcccgg |
| | gcggcctcagtgagcgagcgagcgcgcag |
| 44 | ctgcgcgctcgctcgctcactgaggccgcccgggcaaagcccgggcggcctcagtgagcgagcgagcgcgcagagagggagtggccaactccatca |
| | ctaggggttcctgcggcctagtactaggctcagaggcacacaggagtttctgggctcaccctgcccccttccaacccctcagttcccatcctccagcagctg |
| | tttgtgtgctgcctctgaagtccacactgaacaaacttcagcctactcatgtccctaaaatgggcaaacattgcaagcagcaaacagcaaacacacagccct |
| | ccctgcctgctgaccttggagctggggcagaggtcagagacctctctgggcccatgccacctccaacatccactcgaccccttggaatttcggtggagag |
| | gagcagaggttgtcctggcgtggtttaggtagtgtgagaggggtacccggggatcttgctaccagtggaacagccactaaggattctgcagtgagagcag |
| | agggccagctaagtggtactctcccagagactgtctgactcacgccaccccctccaccttggacacaggacgctgtggtttctgagccaggtacaatgact |
| | cctttcggtaagtgcagtggaagctgtacactgcccaggcaaagcgtccgggcagcgtaggcgggcgactcagatcccagccagtggacttagcccctg |
| | tttgctcctccgataactggggtgaccttggttaatattcaccagcagcctcccccgttgcccctctggatccactgcttaaatacggacgaggacagggccc |
| | tgtctcctcagcttcaggcaccaccactgacctgggacagtgaatagatcctgagaacttcagggtgagtctttgggacccttgttgttttctttccccttttttc |
| | tttggttaagttcttgtcataggaaggggagaagtaacagggtacacatattgaccaaatcagggtaattttgcatttgtaattttaaaaattgctttcttcttttaat |
| | atacttttttgtttatcttatttctaatactttccctaatctctttctttcagggcaatattgatacattgtatcttgcctctttgcaccattctaaagaataacagtgataat |
| | ttctgggttaaggcaatagcaatatttctgcatataaatatttctgcatataaattgtaactgttgtaagaggtttcatattgctaatagcagctacaatccagctac |
| | cattctgcttttattttctggttgggataaggctggattattctgagtccaagctaggcccttttgctaatcttgttcatacctcttatcttcctcccacagctcctggg |
| | caacctgctggtctctctgctggcccatcactttggcaaagcactagtgccaccatggcctctaggctgactctgctgactctgctgctcctgctgctggctgg |
| | ggacagggccagctctaaccccaatgctacttctagctcctctcaggaccctgagagcctgcaggacaggggggagggcaaggtggccaccactgtga |
| | tctctaagatgctgtttgtggagcccatcctggaggtgagcagcctgcccaccaccaacagcaccaccaactctgccactaagatcactgccaacaccact |
| | gatgagcccaccacccagcccactactgagcccaccacccagcctactatccagcccacccagcccactacccagctgcccactgacagccctaccca |
| | gcccaccactggcagcttctgccctgggcctgtgaccctgtgctctgacctggagagccattctactgaggctgtgctgggggatgccctggtggacttctc |
| | tctgaagctgtaccatgctttctctgccatgaagaaggtggagactaacatggcttttagccccttcagcattgctagcctgctgacccaggtgctgctgggg |
| | gctggggagaacactaagaccaacctggaatctatcctgagctaccccaaggacttcacctgtgtgcaccaggccctgaagggcttcaccaccaagggg |
| | gtgacctctgtgagccagatcttccacagccctgacctggccatcagggatacttttgtgaatgccagcagaaccctgtactcttctagccccagggtgctga |
| | gcaataattctgatgctaacctggagctgatcaatacctgggtggctaagaataccaacaacaagattagcaggctgctggactctctgccttctgataccag |
| | gctggtgctgctgaatgccatttacctgtctgccaagtggaagaccacttttgaccctaagaagactaggatggagcctttccacttcaagaactctgtcatta |
| | aggtgcccatgatgaacagcaagaagtatcctgtggcccactttattgaccagactctgaaggccaaggtgggccagctgcagctgagccataacctgag |
| | cctggtgatcctggtgccccagaacctgaagcataggctggaggacatggagcaggctctgagcccctctgtgttcaaggctattatggagaagctggag |
| | atgagcaagttccagcccactctgctgaccctgcccagaatcaaggtgaccacctctcaggacatgctgagcatcatggaaaagctggagttctttgactttt |
| | cttatgacctgaatctgtgtggcctgactgaggatcctgatctgcaggtgtctgccatgcagcaccagactgtgctggagctgactgagactggggtggag |
| | gctgctgctgcttctgccatctctgtggccaggaccctgctggtgtttgaggtgcagcagcccttcctgtttgtgctgtgggaccagcagcacaagtttcctgt |
| | gttcatgggcagggtgtatgaccccagagcctgacatctagagctgaattcctgcagccagggggatcagcctctactgtgccttctagttgccagccatct |
| | gttgtttgcccctcccccttgccttccttgaccctggaaggtgccactcccactgtcctttcctaataaaatgaggaaattgcatcacattgtctgagtaggtgtc |
| | attctattctggggggtggggggggcaggacagcaagggggaggattgggaagacaatagcaggcatgctggggatgcagtgggctctatggcttctg |
| | aggcagaaagaaccagctggggctcgagatccactagggccgcaggaacccctagtgatggagttggccactccctctctgcgcgctcgctcgctcact |
| | gaggccgggcgaccaaaggtcgcccgacgcccgggctttgcccgggcggcctcagtgagcgagcgagcgcgcag |
| 55 | cctgcaggcagctgcgcgctcgctcgctcactgaggccgcccgggcaaagcccgggcggcctcagtgagcgagcgagcgcgcagagagggagtgg |
| | ccaactccatcactaggggttcctgcggcctagtactaggctcagaggcacacaggagtttctgggctcaccctgcccccttccaacccctcagttcccatc |
| | ctccagcagctgtttgtgtgctgcctctgaagtccacactgaacaaacttcagcctactcatgtccctaaaatgggcaaacattgcaagcagcaaacagcaa |
| | acacacagccctccctgcctgctgaccttggagctggggcagaggtcagagacctctctgggcccatgccacctccaacatccactcgaccccttggaatt |
| | tcggtggagaggagcagaggttgtcctggcgtggtttaggtagtgtgagaggggtacccggggatcttgctaccagtggaacagccactaaggattctgc |
| | agtgagagcagagggccagctaagtggtactctcccagagactgtctgactcacgccaccccctccaccttggacacaggacgctgtggtttctgagcca |
| | ggtacaatgactcctttcggtaagtgcagtggaagctgtacactgcccaggcaaagcgtccgggcagcgtaggcgggcgactcagatcccagccagtgg |
| | acttagcccctgtttgctcctccgataactggggtgaccttggttaatattcaccagcagcctcccccgttgcccctctggatccactgcttaaatacggacga |
| | ggacagggccctgtctcctcagcttcaggcaccaccactgacctgggacagtgaatagatcttgagaacttcagggtgagtctatgggacccttgatgttttc |
| | tttccccttcttttctatggttaagttcatgtcataggaaggggagaagtaacagggtacacatattgaccaaatcagggtaattttgcatttgtaattttaaaaaat |
| | gctttcttcttttaatatacttttttgtttatcttatttctaatactttccctaatctctttctttcagggcaataatgatacaatgtatcatgcctctttgcaccattctaaag |
| | aataacagtgataatttctgggttaaggcaatagcaatatttctgcatataaatatttctgcatataaattgtaactgatgtaagaggtttcatattgctaatagcag |
| | ctacaatccagctaccattctgcttttattttctggttgggataaggctggattattctgagtccaagctaggcccttttgctaatcttgttcatacctcttatcttcctc |
| | ccacagctcctgggcaacctgctggtctctctgctggcccatcactttggcaaagcactagtgccaccatggcctctaggctgactctgctgactctgctgct |
| | cctgctgctggctggggacagggccagctctaaccccaatgctacttctagctcctctcaggaccctgagagcctgcaggacaggggggagggcaaggt |
| | ggccaccactgtgatctctaagatgctgtttgtggagcccatcctggaggtgagcagcctgcccaccaccaacagcaccaccaactctgccactaagatca |
| | ctgccaacaccactgatgagcccaccacccagcccactactgagcccaccacccagcctactatccagcccacccagcccactacccagctgcccactg |
| | acagccctacccagcccaccactggcagcttctgccctgggcctgtgaccctgtgctctgacctggagagccattctactgaggctgtgctgggggatgcc |
| | ctggtggacttctctctgaagctgtaccatgctttctctgccatgaagaaggtggagactaacatggcttttagccccttcagcattgctagcctgctgaccca |
| | ggtgctgctgggggctggggagaacactaagaccaacctggaatctatcctgagctaccccaaggacttcacctgtgtgcaccaggccctgaagggcttc |
| | accaccaagggggtgacctctgtgagccagatcttccacagccctgacctggccatcagggatacttttgtgaatgccagcagaaccctgtactcttctagc |
| | cccagggtgctgagcaataattctgatgctaacctggagctgatcaatacctgggtggctaagaataccaacaacaagattagcaggctgctggactctctg |
| | ccttctgataccaggctggtgctgctgaatgccatttacctgtctgccaagtggaagaccacttttgaccctaagaagactaggatggagcctttccacttcaa |
| | gaactctgtcattaaggtgcccatgatgaacagcaagaagtatcctgtggcccactttattgaccagactctgaaggccaaggtgggccagctgcagctga |
| | gccataacctgagcctggtgatcctggtgccccagaacctgaagcataggctggaggacatggagcaggctctgagcccctctgtgttcaaggctattatg |
| | gagaagctggagatgagcaagttccagcccactctgctgaccctgcccagaatcaaggtgaccacctctcaggacatgctgagcatcatggaaaagctg |
| | gagttctttgacttttcttatgacctgaatctgtgtggcctgactgaggatcctgatctgcaggtgtctgccatgcagcaccagactgtgctggagctgactgag |
| | actggggtggaggctgctgctgcttctgccatctctgtggccaggaccctgctggtgtttgaggtgcagcagcccttcctgtttgtgctgtgggaccagcag |
| | cacaagtttcctgtgttcatgggcagggtgtatgaccccagagcctgacatctagactccataaagtaggaaacactacaccattccataaagtaggaaaca |
| | ctacaaccagttccataaagtaggaaacactacatcactccataaagtaggaaacactacactctagagctgaattcctgcagccagggggatcagcctcta |
| | ctgtgccttctagttgccagccatctgttgtttgcccctcccccttgccttccttgaccctggaaggtgccactcccactgtcctttcctaataaaatgaggaaatt |
| | gcatcacattgtctgagtaggtgtcattctattctggggggggggtggggcaggacagcaagggggaggattgggaagacaatagcaggcatgctggg |
| | gatgcagtgggctctatggcttctgaggcagaaagaaccagctggggctcgagatccactagggccgcaggaacccctagtgatggagttggccactcc |
| | ctctctgcgcgctcgctcgctcactgaggccgggcgaccaaaggtcgcccgacgcccgggctttgcccgggcggcctcagtgagcgagcgagcgcgc |
| | ag |
| 56 | cctgcaggcagctgcgcgctcgctcgctcactgaggccgcccgggcaaagcccgggcggcctcagtgagcgagcgagcgcgcagagagggagtgg |
| | ccaactccatcactaggggttcctgcggcctagtaggctcagaggcacacaggagtttctgggctcaccctgcccccttccaacccctcagttcccatcctc |
| | cagcagctgtttgtgtgctgcctctgaagtccacactgaacaaacttcagcctactcatgtccctaaaatgggcaaacattgcaagcagcaaacagcaaaca |
| | cacagccctccctgcctgctgaccttggagctggggcagaggtcagagacctctctgggcccatgccacctccaacatccactcgaccccttggaatttcg |
| | gtggagaggagcagaggttgtcctggcgtggtttaggtagtgtgagaggggtacccggggatcttgctaccagtggaacagccactaaggattctgcagt |
| | gagagcagagggccagctaagtggtactctcccagagactgtctgactcacgccaccccctccaccttggacacaggacgctgtggtttctgagccaggt |
| | acaatgactcctttcggtaagtgcagtggaagctgtacactgcccaggcaaagcgtccgggcagcgtaggcgggcgactcagatcccagccagtggact |
| | tagcccctgtttgctcctccgataactggggtgaccttggttaatattcaccagcagcctcccccgttgcccctctggatccactgcttaaatacggacgagga |
| | cagggccctgtctcctcagcttcaggcaccaccactgacctgggacagtgaatagatcctgagaacttcagggtgagtctatgggacccttgatgttttctttc |
| | cccttcttttctatggttaagttcatgtcataggaaggggagaagtaacagggtacacatattgaccaaatcagggtaattttgcatttgtaattttaaaaaatgct |
| | ttcttcttttaatatacttttttgtttatcttatttctaatactttccctaatctctttctttcagggcaataatgatacaatgtatcatgcctctttgcaccattctaaagaat |
| | aacagtgataatttctgggttaaggcaatagcaatatttctgcatataaatatttctgcatataaattgtaactgatgtaagaggtttcatattgctaatagcagcta |
| | caatccagctaccattctgcttttattttctggttgggataaggctggattattctgagtccaagctaggcccttttgctaatcttgttcatacctcttatcttcctccc |
| | acagctcctgggcaacctgctggtctctctgctggcccatcactttggcaaagcacgcgtgccaccatggcctctaggctgactctgctgactctgctgctcc |
| | tgctgctggctggggacagggccagctctaaccccaatgctacttctagctcctctcaggaccctgagagcctgcaggacaggggggagggcaaggtg |
| | gccaccactgtgatctctaagatgctgtttgtggagcccatcctggaggtgagcagcctgcccaccaccaacagcaccaccaactctgccactaagatcac |
| | tgccaacaccactgatgagcccaccacccagcccactactgagcccaccacccagcctactatccagcccacccagcccactacccagctgcccactga |
| | cagccctacccagcccaccactggcagcttctgccctgggcctgtgaccctgtgctcagacctggagagccactctactgaggctgtgctgggggatgcc |
| | ctggtggacttctctctgaagctgtatcatgctttctctgccatgaagaaggtggagactaacatggcttttagccccttcagcattgctagcctgctgacccag |
| | gtgctgctgggggctggggagaacactaagaccaacctggaatctatcctgagctaccccaaggacttcacctgtgtgcaccaggccctgaagggcttca |
| | ccaccaagggggtgacctctgtgagccagatcttccacagccctgacctggccatcagggatacttttgtgaatgccagcagaaccctgtactcttctagcc |
| | ccagggtgctgagcaataattctgatgctaacctggagctgatcaatacctgggtggctaagaataccaacaacaagattagcaggctgctggactctctgc |
| | cttctgataccaggctggtgctgctgaatgccatttacctgtctgccaagtggaagaccacttttgaccctaagaagactaggatggagcctttccacttcaag |
| | aactctgtcattaaggtgcccatgatgaacagcaagaagtatcctgtggcccactttattgaccagactctgaaggccaaggtgggccagctgcagctgag |
| | ccacaacctgagcctggtgatcctggtgccccagaacctgaagcacaggctggaggacatggagcaggctctgagcccctctgtgttcaaggctattatg |
| | gagaagctggagatgagcaagttccagcccactctgctgaccctgcccagaatcaaggtgaccacctctcaggacatgctgagcatcatggaaaagctg |
| | gagttctttgacttttcttatgacctgaatctgtgtggcctgactgaggatcctgatctgcaggtgtctgccatgcagcaccagactgtgctggagctgactgag |
| | actggggggaggctgctgctgcttctgccatctctgtggccaggaccctgctggtgtttgaggtgcagcagcccttcctgtttgtgctgtgggaccagcag |
| | cacaagtttcctgtgttcatgggcagggtgtatgaccccagagcctgaagatctagagctgaattcctgcagccagggggatcagcctctactgtgccttcta |
| | gttgccagccatctgttgtttgcccctcccccttgccttccttgaccctggaaggtgccactcccactgtcctttcctaataaaatgaggaaattgcatcacattg |
| | tctgagtaggtgtcattctattctggggggggggtggggcaggacagcaagggggaggattgggaagacaatagcaggcatgctggggatgcagtgg |
| | gctctatggcttctgaggcagaaagaaccagctggggctcgagatccactagggccgcaggaacccctagtgatggagttggccactccctctctgcgcg |
| | ctcgctcgctcactgaggccgggcgaccaaaggtcgcccgacgcccgggctttgcccgggcggcctcagtgagcgagcgagcgcgcag |
| 57 | cctgcaggcagctgcgcgctcgctcgctcactgaggccgcccgggcaaagcccgggcggcctcagtgagcgagcgagcgcgcagagagggagtgg |
| | ccaactccatcactaggggttcctgcggcctagtactaggctcagaggcacacaggagtttctgggctcaccctgcccccttccaacccctcagttcccatc |
| | ctccagcagctgtttgtgtgctgcctctgaagtccacactgaacaaacttcagcctactcatgtccctaaaatgggcaaacattgcaagcagcaaacagcaa |
| | acacacagccctccctgcctgctgaccttggagctggggcagaggtcagagacctctctgggcccatgccacctccaacatccactcgaccccttggaatt |
| | tcggtggagaggagcagaggttgtcctggcgtggtttaggtagtgtgagaggggtacccggggatcttgctaccagtggaacagccactaaggattctgc |
| | agtgagagcagagggccagctaagtggtactctcccagagactgtctgactcacgccaccccctccaccttggacacaggacgctgtggtttctgagcca |
| | ggtacaatgactcctttcggtaagtgcagtggaagctgtacactgcccaggcaaagcgtccgggcagcgtaggcgggcgactcagatcccagccagtgg |
| | acttagcccctgtttgctcctccgataactggggtgaccttggttaatattcaccagcagcctcccccgttgcccctctggatccactgcttaaatacggacga |
| | ggacagggccctgtctcctcagcttcaggcaccaccactgacctgggacagtgaatagatctagtctgcactggagctgcctggtgaccagaagtttgga |
| | gtaggtttggtgctgggcaggggggggagtagggtggaaagcatggagtgaagaggtctagggagggggtctcctcacccccgccttcctgcccgcct |
| | tgatctcgggggtctctataggcttgcttccacctgggacttctgcctcctcctaccccagcccctcccgcctcaggcctgttgtgctcagccccccaggacc |
| | tcccctcccccacgcctctggcctcattgtttggttaaagcaggaccccctccccctcccaccacctcccctccgactgaacagatggacagagacccggg |
| | cccacggggagaggaagggccagccggtgccgggaaagggaagcggtttggggaaaacaaaacagagggaggagccagggagaaggtggcccc |
| | aggagggaggaggagggaattcgctaagagggactggggcctgagacggaatggggggggccccggggggggggggcccctgggctcccag |
| | ggtgggagctggctccgaggctggctggctccgcaggtccgctgacgtcgccgcccagatggcctctaggctgactctgctgactctgctgctcctgctg |
| | ctggctggggacagggccagctctaaccccaatgctacttctagctcctctcaggaccctgagagcctgcaggacaggggggagggcaaggtggccac |
| | cactgtgatctctaagatgctgtttgtggagcccatcctggaggtgagcagcctgcccaccaccaacagcaccaccaactctgccactaagatcactgcca |
| | acaccactgatgagcccaccacccagcccactactgagcccaccacccagcctactatccagcccacccagcccactacccagctgcccactgacagc |
| | cctacccagcccaccactggcagcttctgccctgggcctgtgaccctgtgctctgacctggagagccattctactgaggctgtgctgggggatgccctggt |
| | ggacttctctctgaagctgtaccatgctttctctgccatgaagaaggtggagactaacatggcttttagccccttcagcattgctagcctgctgacccaggtgc |
| | tgctgggggctggggagaacactaagaccaacctggaatctatcctgagctaccccaaggacttcacctgtgtgcaccaggccctgaagggcttcaccac |
| | caagggggtgacctctgtgagccagatcttccacagccctgacctggccatcagggatacttttgtgaatgccagcagaaccctgtactcttctagccccag |
| | ggtgctgagcaataattctgatgctaacctggagctgatcaatacctgggtggctaagaataccaacaacaagattagcaggctgctggactctctgccttct |
| | gataccaggctggtgctgctgaatgccatttacctgtctgccaagtggaagaccacttttgaccctaagaagactaggatggagcctttccacttcaagaact |
| | ctgtcattaaggtgcccatgatgaacagcaagaagtatcctgtggcccactttattgaccagactctgaaggccaaggtgggccagctgcagctgagccat |
| | aacctgagcctggtgatcctggtgccccagaacctgaagcataggctggaggacatggagcaggctctgagcccctctgtgttcaaggctattatggaga |
| | agctggagatgagcaagttccagcccactctgctgaccctgcccagaatcaaggtgaccacctctcaggacatgctgagcatcatggaaaagctggagtt |
| | ctttgacttttcttatgacctgaatctgtgtggcctgactgaggatcctgatctgcaggtgtctgccatgcagcaccagactgtgctggagctgactgagactg |
| | gggtggaggctgctgctgcttctgccatctctgtggccaggaccctgctggtgtttgaggtgcagcagcccttcctgtttgtgctgtgggaccagcagcaca |
| | agtttcctgtgttcatgggcagggtgtatgaccccagagcctgacatctagagctgaattcctgcagccagggggatcagcctctactgtgccttctagttgc |
| | cagccatctgttgtttgcccctcccccttgccttccttgaccctggaaggtgccactcccactgtcctttcctaataaaatgaggaaattgcatcacattgtctga |
| | gtaggtgtcattctattctggggggtggggggggcaggacagcaagggggaggattgggaagacaatagcaggcatgctggggatgcagtgggctct |
| | atggcttctgaggcagaaagaaccagctggggctcgagatccactagggccgcaggaacccctagtgatggagttggccactccctctctgcgcgctcg |
| | ctcgctcactgaggccgggcgaccaaaggtcgcccgacgcccgggctttgcccgggcggcctcagtgagcgagcgagcgcgcag |
| 60 | cctgcaggcagctgcgcgctcgctcgctcactgaggccgcccgggcaaagcccgggcggcctcagtgagcgagcgagcgcgcagagagggagtgg |
| | ccaactccatcactaggggttcctgcggcctagtactaggctcagaggcacacaggagtttctgggctcaccctgcccccttccaacccctcagttcccatc |
| | ctccagcagctgtttgtgtgctgcctctgaagtccacactgaacaaacttcagcctactcatgtccctaaaatgggcaaacattgcaagcagcaaacagcaa |
| | acacacagccctccctgcctgctgaccttggagctggggcagaggtcagagacctctctgggcccatgccacctccaacatccactcgaccccttggaatt |
| | tcggtggagaggagcagaggttgtcctggcgtggtttaggtagtgtgagaggggtacccggggatcttgctaccagtggaacagccactaaggattctgc |
| | agtgagagcagagggccagctaagtggtactctcccagagactgtctgactcacgccaccccctccaccttggacacaggacgctgtggtttctgagcca |
| | ggtacaatgactcctttcggtaagtgcagtggaagctgtacactgcccaggcaaagcgtccgggcagcgtaggcgggcgactcagatcccagccagtgg |
| | acttagcccctgtttgctcctccgataactggggtgaccttggttaatattcaccagcagcctcccccgttgcccctctggatccactgcttaaatacggacga |
| | ggacagggccctgtctcctcagcttcaggcaccaccactgacctgggacagtgaatagatcttgaggaataacggaggtgagcaatttccaaaaagttcat |
| | tcctttaaaaactgcggagcacattttgtgtacatgctgtttttattgttactcatgaagacgcgggggaagctttggttgtgtaaagctgagaactgcacccaa |
| | gcttccccgttcaccccacctaccaggggatttgggctaaattcctggcctggcccacaaagaagaccaagcggtcagtcccattccgtcccatcctgattt |
| | acaggaactcacaccagcgatcaatcttccttaatttgtaactgggcagtgtcccgggccagccaatagctaagactgccccccccgcaccccaccctccc |
| | tgaccctgggggactctctactcagtctgcactggagctgcctggtgaccagaagtttggagtaggtttggtgctgggcaggggggggagtagggtgga |
| | aagcatggagtgaagaggtctagggagggggtctcctcacccccgccttcctgcccgccttgatctcgggggtctctataggcttgcttccacctgggactt |
| | ctgcctcctcctaccccagcccctcccgcctcaggcctgttgtgctcagccccccaggacctcccctcccccacgcctctggcctcattgtttggttaaagca |
| | ggaccccctccccctcccaccacctcccctccgactgaacagatggacagagacccgggcccacggggagaggaagggccagccggtgccgggaa |
| | agggaagcggtttggggaaaacaaaacagagggaggagccagggagaaggtggccccaggagggaggaggagggaattcgctaagagggactgg |
| | ggcctgagacggaatggggggggccccgggcggggtgggggcccctgggctcccagggtgggagctggctccgaggctggctggctccgcaggt |
| | ccgctgacgtcgccgcccagatggcctctaggctgactctgctgactctgctgctcctgctgctggctggggacagggccagctctaaccccaatgctact |
| | tctagctcctctcaggaccctgagagcctgcaggacaggggggagggcaaggtggccaccactgtgatctctaagatgctgtttgtggagcccatcctgg |
| | aggtgagcagcctgcccaccaccaacagcaccaccaactctgccactaagatcactgccaacaccactgatgagcccaccacccagcccactactgag |
| | cccaccacccagcctactatccagcccacccagcccactacccagctgcccactgacagccctacccagcccaccactggcagcttctgccctgggcct |
| | gtgaccctgtgctctgacctggagagccattctactgaggctgtgctgggggatgccctggtggacttctctctgaagctgtaccatgctttctctgccatgaa |
| | gaaggtggagactaacatggcttttagccccttcagcattgctagcctgctgacccaggtgctgctgggggctggggagaacactaagaccaacctggaa |
| | tctatcctgagctaccccaaggacttcacctgtgtgcaccaggccctgaagggcttcaccaccaagggggtgacctctgtgagccagatcttccacagccc |
| | tgacctggccatcagggatacttttgtgaatgccagcagaaccctgtactcttctagccccagggtgctgagcaataattctgatgctaacctggagctgatc |
| | aatacctgggtggctaagaataccaacaacaagattagcaggctgctggactctctgccttctgataccaggctggtgctgctgaatgccatttacctgtctg |
| | ccaagtggaagaccacttttgaccctaagaagactaggatggagcctttccacttcaagaactctgtcattaaggtgcccatgatgaacagcaagaagtatc |
| | ctgtggcccactttattgaccagactctgaaggccaaggtgggccagctgcagctgagccataacctgagcctggtgatcctggtgccccagaacctgaa |
| | gcataggctggaggacatggagcaggctctgagcccctctgtgttcaaggctattatggagaagctggagatgagcaagttccagcccactctgctgacc |
| | ctgcccagaatcaaggtgaccacctctcaggacatgctgagcatcatggaaaagctggagttctttgacttttcttatgacctgaatctgtgtggcctgactga |
| | ggatcctgatctgcaggtgtctgccatgcagcaccagactgtgctggagctgactgagactggggggaggctgctgctgcttctgccatctctgtggcca |
| | ggaccctgctggtgtttgaggtgcagcagcccttcctgtttgtgctgtgggaccagcagcacaagtttcctgtgttcatgggcagggtgtatgaccccagag |
| | cctgacatctagagctgaattcctgcagccagggggatcagcctctactgtgccttctagttgccagccatctgttgtttgcccctcccccttgccttccttgac |
| | cctggaaggtgccactcccactgtcctttcctaataaaatgaggaaattgcatcacattgtctgagtaggtgtcattctattctggggggtggggggggcag |
| | gacagcaagggggaggattgggaagacaatagcaggcatgctggggatgcagtgggctctatggcttctgaggcagaaagaaccagctggggctcga |
| | gatccactagggccgcaggaacccctagtgatggagttggccactccctctctgcgcgctcgctcgctcactgaggccgggcgaccaaaggtcgcccga |
| | cgcccgggctttgcccgggcggcctcagtgagcgagcgagcgcgcag |
| 61 | cctgcaggcagctgcgcgctcgctcgctcactgaggccgcccgggcaaagcccgggcggcctcagtgagcgagcgagcgcgcagagagggagtgg |
| | ccaactccatcactaggggttcctgcggcctagtactaggctcagaggcacacaggagtttctgggctcaccctgcccccttccaacccctcagttcccatc |
| | ctccagcagctgtttgtgtgctgcctctgaagtccacactgaacaaacttcagcctactcatgtccctaaaatgggcaaacattgcaagcagcaaacagcaa |
| | acacacagccctccctgcctgctgaccttggagctggggcagaggtcagagacctctctgggcccatgccacctccaacatccactcgaccccttggaatt |
| | tcggtggagaggagcagaggttgtcctggcgtggtttaggtagtgtgagaggggtacccggggatcttgctaccagtggaacagccactaaggattctgc |
| | agtgagagcagagggccagctaagtggtactctcccagagactgtctgactcacgccaccccctccaccttggacacaggacgctgtggtttctgagcca |
| | ggtacaatgactcctttcggtaagtgcagtggaagctgtacactgcccaggcaaagcgtccgggcagcgtaggcgggcgactcagatcccagccagtgg |
| | acttagcccctgtttgctcctccgataactggggtgaccttggttaatattcaccagcagcctcccccgttgcccctctggatccactgcttaaatacggacga |
| | ggacagggccctgtctcctcagcttcaggcaccaccactgacctgggacagtgaatagatcttgaggaataacggaggtgagcaatttccaaaaagttcat |
| | tcctttaaaaactgcggagcacattttgtgtacatgctgtttttattgttactcatgaagacgcgggggaagctttggttgtgtaaagctgagaactgcacccaa |
| | gcttccccgttcaccccacctaccaggggatttgggctaaattcctggcctggcccacaaagaagaccaagcggtcagtcccattccgtcccatcctgattt |
| | acaggaactcacaccagcgatcaatcttccttaatttgtaactgggcagtgtcccgggccagccaatagctaagactgccccccccgcaccccaccctccc |
| | tgaccctgggggactctctactctgagaacttcagggtgagtctatgggacccttgatgttttctttccccttcttttctatggttaagttcatgtcataggaaggg |
| | gagaagtaacagggtacacatattgaccaaatcagggtaattttgcatttgtaattttaaaaaatgctttcttcttttaatatacttttttgtttatcttatttctaatacttt |
| | ccctaatctctttctttcagggcaataatgatacaatgtatcatgcctctttgcaccattctaaagaataacagtgataatttctgggttaaggcaatagcaatattt |
| | ctgcatataaatatttctgcatataaattgtaactgatgtaagaggtttcatattgctaatagcagctacaatccagctaccattctgcttttattttctggttgggata |
| | aggctggattattctgagtccaagctaggcccttttgctaatcttgttcatacctcttatcttcctcccacagctcctgggcaacctgctggtctctctgctggccc |
| | atcactttggcaaagcactagtgccaccatggcctctaggctgactctgctgactctgctgctcctgctgctggctggggacagggccagctctaaccccaa |
| | tgctacttctagctcctctcaggaccctgagagcctgcaggacaggggggagggcaaggtggccaccactgtgatctctaagatgctgtttgtggagccca |
| | tcctggaggtgagcagcctgcccaccaccaacagcaccaccaactctgccactaagatcactgccaacaccactgatgagcccaccacccagcccacta |
| | ctgagcccaccacccagcctactatccagcccacccagcccactacccagctgcccactgacagccctacccagcccaccactggcagcttctgccctg |
| | ggcctgtgaccctgtgctctgacctggagagccattctactgaggctgtgctgggggatgccctggtggacttctctctgaagctgtaccatgctttctctgcc |
| | atgaagaaggtggagactaacatggcttttagccccttcagcattgctagcctgctgacccaggtgctgctgggggctggggagaacactaagaccaacc |
| | tggaatctatcctgagctaccccaaggacttcacctgtgtgcaccaggccctgaagggcttcaccaccaagggggtgacctctgtgagccagatcttccac |
| | agccctgacctggccatcagggatacttttgtgaatgccagcagaaccctgtactcttctagccccagggtgctgagcaataattctgatgctaacctggagc |
| | tgatcaatacctgggtggctaagaataccaacaacaagattagcaggctgctggactctctgccttctgataccaggctggtgctgctgaatgccatttacct |
| | gtctgccaagtggaagaccacttttgaccctaagaagactaggatggagcctttccacttcaagaactctgtcattaaggtgcccatgatgaacagcaagaa |
| | gtatcctgtggcccactttattgaccagactctgaaggccaaggtgggccagctgcagctgagccataacctgagcctggtgatcctggtgccccagaacc |
| | tgaagcataggctggaggacatggagcaggctctgagcccctctgtgttcaaggctattatggagaagctggagatgagcaagttccagcccactctgctg |
| | accctgcccagaatcaaggtgaccacctctcaggacatgctgagcatcatggaaaagctggagttctttgacttttcttatgacctgaatctgtgtggcctgac |
| | tgaggatcctgatctgcaggtgtctgccatgcagcaccagactgtgctggagctgactgagactggggggaggctgctgctgcttctgccatctctgtggc |
| | caggaccctgctggtgtttgaggtgcagcagcccttcctgtttgtgctgtgggaccagcagcacaagtttcctgtgttcatgggcagggtgtatgaccccag |
| | agcctgacatctagagctgaattcctgcagccagggggatcagcctctactgtgccttctagttgccagccatctgttgtttgcccctcccccttgccttccttg |
| | accctggaaggtgccactcccactgtcctttcctaataaaatgaggaaattgcatcacattgtctgagtaggtgtcattctattctggggggtggggggggc |
| | aggacagcaagggggaggattgggaagacaatagcaggcatgctggggatgcagtgggctctatggcttctgaggcagaaagaaccagctggggctc |
| | gagatccactagggccgcaggaacccctagtgatggagttggccactccctctctgcgcgctcgctcgctcactgaggccgggcgaccaaaggtcgccc |
| | gacgcccgggctttgcccgggcggcctcagtgagcgagcgagcgcgcag |
| 62 | cctgcaggcagctgcgcgctcgctcgctcactgaggccgcccgggcaaagcccgggcggcctcagtgagcgagcgagcgcgcagagagggagtgg |
| | ccaactccatcactaggggttcctgcggcctagtactaggctcagaggcacacaggagtttctgggctcaccctgcccccttccaacccctcagttcccatc |
| | ctccagcagctgtttgtgtgctgcctctgaagtccacactgaacaaacttcagcctactcatgtccctaaaatgggcaaacattgcaagcagcaaacagcaa |
| | acacacagccctccctgcctgctgaccttggagctggggcagaggtcagagacctctctgggcccatgccacctccaacatccactcgaccccttggaatt |
| | tcggtggagaggagcagaggttgtcctggcgtggtttaggtagtgtgagaggggtacccggggatcttgctaccagtggaacagccactaaggattctgc |
| | agtgagagcagagggccagctaagtggtactctcccagagactgtctgactcacgccaccccctccaccttggacacaggacgctgtggtttctgagcca |
| | ggtacaatgactcctttcggtaagtgcagtggaagctgtacactgcccaggcaaagcgtccgggcagcgtaggcgggcgactcagatcccagccagtgg |
| | acttagcccctgtttgctcctccgataactggggtgaccttggttaatattcaccagcagcctcccccgttgcccctctggatccactgcttaaatacggacga |
| | ggacagggccctgtctcctcagcttcaggcaccaccactgacctgggacagtgaatagatcttgagaacttcagggtgagtctatgggacccttgatgttttc |
| | tttccccttcttttctatggttaagttcatgtcataggaaggggagaagtaacagggtacacatattgaccaaatcagggtaattttgcatttgtaattttaaaaaat |
| | gctttcttcttttaatatacttttttgtttatcttatttctaatactttccctaatctctttctttcagggcaataatgatacaatgtatcatgcctctttgcaccattctaaag |
| | aataacagtgataatttctgggttaaggcaatagcaatatttctgcatataaatatttctgcatataaattgtaactgatgtaagaggtttcatattgctaatagcag |
| | ctacaatccagctaccattctgcttttattttctggttgggataaggctggattattctgagtccaagctaggcccttttgctaatcttgttcatacctcttatcttcctc |
| | ccacagctcctgggcaacctgctggtctctctgctggcccatcactttggcaaagcactagtagggacccgcagctcagctacagcacagatcagccacc |
| | atggcctctaggctgactctgctgactctgctgctcctgctgctggctggggacagggccagctctaaccccaatgctacttctagctcctctcaggaccctg |
| | agagcctgcaggacaggggggagggcaaggtggccaccactgtgatctctaagatgctgtttgtggagcccatcctggaggtgagcagcctgcccacc |
| | accaacagcaccaccaactctgccactaagatcactgccaacaccactgatgagcccaccacccagcccactactgagcccaccacccagcctactatc |
| | cagcccacccagcccactacccagctgcccactgacagccctacccagcccaccactggcagcttctgccctgggcctgtgaccctgtgctctgacctgg |
| | agagccattctactgaggctgtgctgggggatgccctggtggacttctctctgaagctgtaccatgctttctctgccatgaagaaggtggagactaacatggc |
| | ttttagccccttcagcattgctagcctgctgacccaggtgctgctgggggctggggagaacactaagaccaacctggaatctatcctgagctaccccaagg |
| | acttcacctgtgtgcaccaggccctgaagggcttcaccaccaagggggtgacctctgtgagccagatcttccacagccctgacctggccatcagggatact |
| | tttgtgaatgccagcagaaccctgtactcttctagccccagggtgctgagcaataattctgatgctaacctggagctgatcaatacctgggtggctaagaata |
| | ccaacaacaagattagcaggctgctggactctctgccttctgataccaggctggtgctgctgaatgccatttacctgtctgccaagtggaagaccacttttga |
| | ccctaagaagactaggatggagcctttccacttcaagaactctgtcattaaggtgcccatgatgaacagcaagaagtatcctgtggcccactttattgaccag |
| | actctgaaggccaaggtgggccagctgcagctgagccataacctgagcctggtgatcctggtgccccagaacctgaagcataggctggaggacatgga |
| | gcaggctctgagcccctctgtgttcaaggctattatggagaagctggagatgagcaagttccagcccactctgctgaccctgcccagaatcaaggtgacca |
| | cctctcaggacatgctgagcatcatggaaaagctggagttctttgacttttcttatgacctgaatctgtgtggcctgactgaggatcctgatctgcaggtgtctg |
| | ccatgcagcaccagactgtgctggagctgactgagactggggggaggctgctgctgcttctgccatctctgtggccaggaccctgctggtgtttgaggtg |
| | cagcagcccttcctgtttgtgctgtgggaccagcagcacaagtttcctgtgttcatgggcagggtgtatgaccccagagcctgacatctagagctgaattcct |
| | gcagccagggggatcagcctctactgtgccttctagttgccagccatctgttgtttgcccctcccccttgccttccttgaccctggaaggtgccactcccactg |
| | tcctttcctaataaaatgaggaaattgcatcacattgtctgagtaggtgtcattctattctggggggtggggggggcaggacagcaagggggaggattggg |
| | aagacaatagcaggcatgctggggatgcagtgggctctatggcttctgaggcagaaagaaccagctggggctcgagatccactagggccgcaggaacc |
| | cctagtgatggagttggccactccctctctgcgcgctcgctcgctcactgaggccgggcgaccaaaggtcgcccgacgcccgggctttgcccgggcggc |
| | ctcagtgagcgagcgagcgcgcag |
| 63 | cctgcaggcagctgcgcgctcgctcgctcactgaggccgcccgggcaaagcccgggcggcctcagtgagcgagcgagcgcgcagagagggagtgg |
| | ccaactccatcactaggggttcctgcggcctagtactaggctcagaggcacacaggagtttctgggctcaccctgcccccttccaacccctcagttcccatc |
| | ctccagcagctgtttgtgtgctgcctctgaagtccacactgaacaaacttcagcctactcatgtccctaaaatgggcaaacattgcaagcagcaaacagcaa |
| | acacacagccctccctgcctgctgaccttggagctggggcagaggtcagagacctctctgggcccatgccacctccaacatccactcgaccccttggaatt |
| | tcggtggagaggagcagaggttgtcctggcgtggtttaggtagtgtgagaggggtacccggggatcttgctaccagtggaacagccactaaggattctgc |
| | agtgagagcagagggccagctaagtggtactctcccagagactgtctgactcacgccaccccctccaccttggacacaggacgctgtggtttctgagcca |
| | ggtacaatgactcctttcggtaagtgcagtggaagctgtacactgcccaggcaaagcgtccgggcagcgtaggcgggcgactcagatcccagccagtgg |
| | acttagcccctgtttgctcctccgataactggggtgaccttggttaatattcaccagcagcctcccccgttgcccctctggatccactgcttaaatacggacga |
| | ggacagggccctgtctcctcagcttcaggcaccaccactgacctgggacagtgaatagatcttgagaacttcagggtgagtctatgggacccttgatgttttc |
| | tttccccttcttttctatggttaagttcatgtcataggaaggggagaagtaacagggtacacatattgaccaaatcagggtaattttgcatttgtaattttaaaaaat |
| | gctttcttcttttaatatacttttttgtttatcttatttctaatactttccctaatctctttctttcagggcaataatgatacaatgtatcatgcctctttgcaccattctaaag |
| | aataacagtgataatttctgggttaaggcaatagcaatatttctgcatataaatatttctgcatataaattgtaactgatgtaagaggtttcatattgctaatagcag |
| | ctacaatccagctaccattctgcttttattttctggttgggataaggctggattattctgagtccaagctaggcccttttgctaatcttgttcatacctcttatcttcctc |
| | ccacagctcctgggcaacctgctggtctctctgctggcccatcactttggcaaagcactagtgccaccatggcctctaggctgactctgctgactctgctgct |
| | cctgctgctggctggggacagggccagctctaaccccaatgctacttctagctcctctcaggaccctgagagcctgcaggacaggggggagggcaaggt |
| | ggccaccactgtgatctctaagatgctgtttgtggagcccatcctggaggtgagcagcctgcccaccaccaacagcaccaccaactctgccactaagatca |
| | ctgccaacaccactgatgagcccaccacccagcccactactgagcccaccacccagcctactatccagcccacccagcccactacccagctgcccactg |
| | acagccctacccagcccaccactggcagcttctgccctgggcctgtgaccctgtgctctgacctggagagccattctactgaggctgtgctgggggatgcc |
| | ctggtggacttctctctgaagctgtaccatgctttctctgccatgaagaaggtggagactaacatggcttttagccccttcagcattgctagcctgctgaccca |
| | ggtgctgctgggggctggggagaacactaagaccaacctggaatctatcctgagctaccccaaggacttcacctgtgtgcaccaggccctgaagggcttc |
| | accaccaagggggtgacctctgtgagccagatcttccacagccctgacctggccatcagggatacttttgtgaatgccagcagaaccctgtactcttctagc |
| | cccagggtgctgagcaataattctgatgctaacctggagctgatcaatacctgggtggctaagaataccaacaacaagattagcaggctgctggactctctg |
| | ccttctgataccaggctggtgctgctgaatgccatttacctgtctgccaagtggaagaccacttttgaccctaagaagactaggatggagcctttccacttcaa |
| | gaactctgtcattaaggtgcccatgatgaacagcaagaagtatcctgtggcccactttattgaccagactctgaaggccaaggtgggccagctgcagctga |
| | gccataacctgagcctggtgatcctggtgccccagaacctgaagcataggctggaggacatggagcaggctctgagcccctctgtgttcaaggctattatg |
| | gagaagctggagatgagcaagttccagcccactctgctgaccctgcccagaatcaaggtgaccacctctcaggacatgctgagcatcatggaaaagctg |
| | gagttctttgacttttcttatgacctgaatctgtgtggcctgactgaggatcctgatctgcaggtgtctgccatgcagcaccagactgtgctggagctgactgag |
| | actggggtggaggctgctgctgcttctgccatctctgtggccaggaccctgctggtgtttgaggtgcagcagcccttcctgtttgtgctgtgggaccagcag |
| | cacaagtttcctgtgttcatgggcagggtgtatgaccccagagcctgacatctagagcttcctcttcactctgctctcaggagacctggctatgaggccctcg |
| | gggcagggatacaaagttagtgaggtctatgtccagagaagctgagatatggcatataataggcatctaataaatgcttaagaggtggaatctagagctgaa |
| | ttcctgcagccagggggatcagcctctactgtgccttctagttgccagccatctgttgtttgcccctcccccttgccttccttgaccctggaaggtgccactccc |
| | actgtcctttcctaataaaatgaggaaattgcatcacattgtctgagtaggtgtcattctattctggggggtggggggggcaggacagcaagggggaggat |
| | tgggaagacaatagcaggcatgctggggatgcagtgggctctatggcttctgaggcagaaagaaccagctggggctcgagatccactagggccgcagg |
| | aacccctagtgatggagttggccactccctctctgcgcgctcgctcgctcactgaggccgggcgaccaaaggtcgcccgacgcccgggctttgcccggg |
| | cggcctcagtgagcgagcgagcgcgcag |
| 64 | cctgcaggcagctgcgcgctcgctcgctcactgaggccgcccgggcaaagcccgggggcctcagtgagcgagcgagcgcgcagagagggagtgg |
| | ccaactccatcactaggggttcctgcggcctagtactaggctcagaggcacacaggagtttctgggctcaccctgcccccttccaacccctcagttcccatc |
| | ctccagcagctgtttgtgtgctgcctctgaagtccacactgaacaaacttcagcctactcatgtccctaaaatgggcaaacattgcaagcagcaaacagcaa |
| | acacacagccctccctgcctgctgaccttggagctggggcagaggtcagagacctctctgggcccatgccacctccaacatccactcgaccccttggaatt |
| | tcggtggagaggagcagaggttgtcctggcgtggtttaggtagtgtgagaggggtacccggggatcttgctaccagtggaacagccactaaggattctgc |
| | agtgagagcagagggccagctaagtggtactctcccagagactgtctgactcacgccaccccctccaccttggacacaggacgctgtggtttctgagcca |
| | ggtacaatgactcctttcggtaagtgcagtggaagctgtacactgcccaggcaaagcgtccgggcagcgtaggcgggcgactcagatcccagccagtgg |
| | acttagcccctgtttgctcctccgataactggggtgaccttggttaatattcaccagcagcctcccccgttgcccctctggatccactgcttaaatacggacga |
| | ggacagggccctgtctcctcagcttcaggcaccaccactgacctgggacagtgaatagatcttgagaacttcagggtgagtctatgggacccttgatgttttc |
| | tttccccttcttttctatggttaagttcatgtcataggaaggggagaagtaacagggtacacatattgaccaaatcagggtaattttgcatttgtaattttaaaaaat |
| | gctttcttcttttaatatacttttttgtttatcttatttctaatactttccctaatctctttctttcagggcaataatgatacaatgtatcatgcctctttgcaccattctaaag |
| | aataacagtgataatttctgggttaaggcaatagcaatatttctgcatataaatatttctgcatataaattgtaactgatgtaagaggtttcatattgctaatagcag |
| | ctacaatccagctaccattctgcttttattttctggttgggataaggctggattattctgagtccaagctaggcccttttgctaatcttgttcatacctcttatcttcctc |
| | ccacagctcctgggcaacctgctggtctctctgctggcccatcactttggcaaagcactagtagggacccgcagctcagctacagcacagatcagccacc |
| | atggcctctaggctgactctgctgactctgctgctcctgctgctggctggggacagggccagctctaaccccaatgctacttctagctcctctcaggaccctg |
| | agagcctgcaggacaggggggagggcaaggtggccaccactgtgatctctaagatgctgtttgtggagcccatcctggaggtgagcagcctgcccacc |
| | accaacagcaccaccaactctgccactaagatcactgccaacaccactgatgagcccaccacccagcccactactgagcccaccacccagcctactatc |
| | cagcccacccagcccactacccagctgcccactgacagccctacccagcccaccactggcagcttctgccctgggcctgtgaccctgtgctctgacctgg |
| | agagccattctactgaggctgtgctgggggatgccctggtggacttctctctgaagctgtaccatgctttctctgccatgaagaaggtggagactaacatggc |
| | ttttagccccttcagcattgctagcctgctgacccaggtgctgctgggggctggggagaacactaagaccaacctggaatctatcctgagctaccccaagg |
| | acttcacctgtgtgcaccaggccctgaagggcttcaccaccaagggggtgacctctgtgagccagatcttccacagccctgacctggccatcagggatact |
| | tttgtgaatgccagcagaaccctgtactcttctagccccagggtgctgagcaataattctgatgctaacctggagctgatcaatacctgggtggctaagaata |
| | ccaacaacaagattagcaggctgctggactctctgccttctgataccaggctggtgctgctgaatgccatttacctgtctgccaagtggaagaccacttttga |
| | ccctaagaagactaggatggagcctttccacttcaagaactctgtcattaaggtgcccatgatgaacagcaagaagtatcctgtggcccactttattgaccag |
| | actctgaaggccaaggtgggccagctgcagctgagccataacctgagcctggtgatcctggtgccccagaacctgaagcataggctggaggacatgga |
| | gcaggctctgagcccctctgtgttcaaggctattatggagaagctggagatgagcaagttccagcccactctgctgaccctgcccagaatcaaggtgacca |
| | cctctcaggacatgctgagcatcatggaaaagctggagttctttgacttttcttatgacctgaatctgtgtggcctgactgaggatcctgatctgcaggtgtctg |
| | ccatgcagcaccagactgtgctggagctgactgagactggggtggaggctgctgctgcttctgccatctctgtggccaggaccctgctggtgtttgaggtg |
| | cagcagcccttcctgtttgtgctgtgggaccagcagcacaagtttcctgtgttcatgggcagggtgtatgaccccagagcctgacatctagagcttcctcttc |
| | actctgctctcaggagacctggctatgaggccctcggggcagggatacaaagttagtgaggtctatgtccagagaagctgagatatggcatataataggca |
| | tctaataaatgcttaagaggtggaatctagagctgaattcctgcagccagggggatcagcctctactgtgccttctagttgccagccatctgttgtttgcccctc |
| | ccccttgccttccttgaccctggaaggtgccactcccactgtcctttcctaataaaatgaggaaattgcatcacattgtctgagtaggtgtcattctattctgggg |
| | ggtggggggggcaggacagcaagggggaggattgggaagacaatagcaggcatgctggggatgcagtgggctctatggcttctgaggcagaaaga |
| | accagctggggctcgagatccactagggccgcaggaacccctagtgatggagttggccactccctctctgcgcgctcgctcgctcactgaggccgggcg |
| | accaaaggtcgcccgacgcccgggctttgcccgggcggcctcagtgagcgagcgagcgcgcag |
| 65 | cctgcaggcagctgcgcgctcgctcgctcactgaggccgcccgggcaaagcccgggcggcctcagtgagcgagcgagcgcgcagagagggagtgg |
| | ccaactccatcactaggggttcctgcggcctagtactaggctcagaggcacacaggagtttctgggctcaccctgcccccttccaacccctcagttcccatc |
| | ctccagcagctgtttgtgtgctgcctctgaagtccacactgaacaaacttcagcctactcatgtccctaaaatgggcaaacattgcaagcagcaaacagcaa |
| | acacacagccctccctgcctgctgaccttggagctggggcagaggtcagagacctctctgggcccatgccacctccaacatccactcgaccccttggaatt |
| | tcggtggagaggagcagaggttgtcctggcgtggtttaggtagtgtgagaggggtacccggggatcttgctaccagtggaacagccactaaggattctgc |
| | agtgagagcagagggccagctaagtggtactctcccagagactgtctgactcacgccaccccctccaccttggacacaggacgctgtggtttctgagcca |
| | ggtacaatgactcctttcggtaagtgcagtggaagctgtacactgcccaggcaaagcgtccgggcagcgtaggcgggcgactcagatcccagccagtgg |
| | acttagcccctgtttgctcctccgataactggggtgaccttggttaatattcaccagcagcctcccccgttgcccctctggatccactgcttaaatacggacga |
| | ggacagggccctgtctcctcagcttcaggcaccaccactgacctgggacagtgaatagatcttgggcacgtccccagctgggctgcctatttaacgcacca |
| | cactctcattctcccaaggtggggctccaggactaggctggggcagcagaaagtccccctctctacattgtccttggctcaggagccaacttagaaaaagc |
| | atttccaaattggctaagccagcggagcagagattttctgtgctgagaaatatcaggacatccagaggggtggaaggaggcttccagggcacacatgaga |
| | tgtggcaggggtaggctgtccgttttaaagcttaaagctttagacatgaactcacagggatttcagtcagggtcatctgccatgtggcccagcagggcccat |
| | cctgaggaaatgaccggtatagtcaggagctggctgaagagctgccctcactccacaccttccagcagcccaggtgccgccatcacggggctcccactg |
| | gcatctctgcagctgcacttcccccaatgctgaggagcagagctgatctagcaccctgtccattgccaaggcacagcaaacctctcttgttcccataggttac |
| | acaactgggataaatgacccgggatgaagaaaccaccggcatccaggaacttgtcttagaccagtttgtaggggaaatgacctgcagggactttccccag |
| | ggaccacatccagcttttcttccctcccaagagaccagcaaggctctgagaacttcagggtgagtctatgggacccttgatgttttctttccccttcttttctatg |
| | gttaagttcatgtcataggaaggggagaagtaacagggtacacatattgaccaaatcagggtaattttgcatttgtaattttaaaaaatgctttcttcttttaatata |
| | cttttttgtttatcttatttctaatactttccctaatctctttctttcagggcaataatgatacaatgtatcatgcctctttgcaccattctaaagaataacagtgataattt |
| | ctgggttaaggcaatagcaatatttctgcatataaatatttctgcatataaattgtaactgatgtaagaggtttcatattgctaatagcagctacaatccagctacc |
| | attctgcttttattttctggttgggataaggctggattattctgagtccaagctaggcccttttgctaatcttgttcatacctcttatcttcctcccacagctcctgggc |
| | aacctgctggtctctctgctggcccatcactttggcaaagcactagtgagggacccgcagctcagctacagcacagatcagccaccatggcctctaggctg |
| | actctgctgactctgctgctcctgctgctggctggggacagggccagctctaaccccaatgctacttctagctcctctcaggaccctgagagcctgcaggac |
| | aggggggagggcaaggtggccaccactgtgatctctaagatgctgtttgtggagcccatcctggaggtgagcagcctgcccaccaccaacagcaccac |
| | caactctgccactaagatcactgccaacaccactgatgagcccaccacccagcccactactgagcccaccacccagcctactatccagcccacccagcc |
| | cactacccagctgcccactgacagccctacccagcccaccactggcagcttctgccctgggcctgtgaccctgtgctctgacctggagagccattctactg |
| | aggctgtgctgggggatgccctggtggacttctctctgaagctgtaccatgctttctctgccatgaagaaggtggagactaacatggcttttagccccttcag |
| | cattgctagcctgctgacccaggtgctgctgggggctggggagaacactaagaccaacctggaatctatcctgagctaccccaaggacttcacctgtgtgc |
| | accaggccctgaagggcttcaccaccaagggggtgacctctgtgagccagatcttccacagccctgacctggccatcagggatacttttgtgaatgccag |
| | cagaaccctgtactcttctagccccagggtgctgagcaataattctgatgctaacctggagctgatcaatacctgggggctaagaataccaacaacaagatt |
| | agcaggctgctggactctctgccttctgataccaggctggtgctgctgaatgccatttacctgtctgccaagtggaagaccacttttgaccctaagaagacta |
| | ggatggagcctttccacttcaagaactctgtcattaaggtgcccatgatgaacagcaagaagtatcctgtggcccactttattgaccagactctgaaggccaa |
| | ggtgggccagctgcagctgagccataacctgagcctggtgatcctggtgccccagaacctgaagcataggctggaggacatggagcaggctctgagcc |
| | cctctgtgttcaaggctattatggagaagctggagatgagcaagttccagcccactctgctgaccctgcccagaatcaaggtgaccacctctcaggacatg |
| | ctgagcatcatggaaaagctggagttctttgacttttcttatgacctgaatctgtgtggcctgactgaggatcctgatctgcaggtgtctgccatgcagcacca |
| | gactgtgctggagctgactgagactggggtggaggctgctgctgcttctgccatctctgtggccaggaccctgctggtgtttgaggtgcagcagcccttcct |
| | gtttgtgctgtgggaccagcagcacaagtttcctgtgttcatgggcagggtgtatgaccccagagcctgacatctagagctgaattcctgcagccaggggg |
| | atcagcctctactgtgccttctagttgccagccatctgttgtttgcccctcccccttgccttccttgaccctggaaggtgccactcccactgtcctttcctaataaa |
| | atgaggaaattgcatcacattgtctgagtaggtgtcattctattctggggggtggggggggcaggacagcaagggggaggattgggaagacaatagcag |
| | gcatgctggggatgcagtgggctctatggcttctgaggcagaaagaaccagctggggctcgagatccactagggccgcaggaacccctagtgatggagt |
| | tggccactccctctctgcgcgctcgctcgctcactgaggccgggcgaccaaaggtcgcccgacgcccgggctttgcccgggcggcctcagtgagcgag |
| | cgagcgcgcag |
| 66 | cctgcaggcagctgcgcgctcgctcgctcactgaggccgcccgggcaaagcccgggggcctcagtgagcgagcgagcgcgcagagagggagtgg |
| | ccaactccatcactaggggttcctgcggcctagtactgcgcaaagtcaacacaagcctctccaccgtgtgtccatgtttatgtgtatgcgctgtgccccgtcat |
| | gccacctggacgcagggactccagtgacctctccttgcacaagcctctgctggtttgggaaagattggcatgacatcagccaagctctggccttgcctttttt |
| | ccctgcgcaaagtcaacacaagcctctccaccgtgtgtccatgtttatgtgtatgcgctgtgccccgtcatgccacctggacgcagggactccagtgacctc |
| | tccttgcacaagcctctgctggtttgggaaagattggcatgacatcagccaagctctggccttgccttttttccctagtactaggctcagaggcacacaggagt |
| | ttctgggctcaccctgcccccttccaacccctcagttcccatcctccagcagctgtttgtgtgctgcctctgaagtccacactgaacaaacttcagcctactcat |
| | gtccctaaaatgggcaaacattgcaagcagcaaacagcaaacacacagccctccctgcctgctgaccttggagctggggcagaggtcagagacctctct |
| | gggcccatgccacctccaacatccactcgaccccttggaatttcggtggagaggagcagaggttgtcctggcgtggtttaggtagtgtgagaggggtacc |
| | cggggatcttgctaccagtggaacagccactaaggattctgcagtgagagcagagggccagctaagtggtactctcccagagactgtctgactcacgcca |
| | ccccctccaccttggacacaggacgctgtggtttctgagccaggtacaatgactcctttcggtaagtgcagtggaagctgtacactgcccaggcaaagcgt |
| | ccgggcagcgtaggcgggcgactcagatcccagccagtggacttagcccctgtttgctcctccgataactggggtgaccttggttaatattcaccagcagc |
| | ctcccccgttgcccctctggatccactgcttaaatacggacgaggacagggccctgtctcctcagcttcaggcaccaccactgacctgggacagtgaatag |
| | atcttgagaacttcagggtgagtctatgggacccttgatgttttctttccccttcttttctatggttaagttcatgtcataggaaggggagaagtaacagggtaca |
| | catattgaccaaatcagggtaattttgcatttgtaattttaaaaaatgctttcttcttttaatatacttttttgtttatcttatttctaatactttccctaatctctttctttcagg |
| | gcaataatgatacaatgtatcatgcctctttgcaccattctaaagaataacagtgataatttctgggttaaggcaatagcaatatttctgcatataaatatttctgca |
| | tataaattgtaactgatgtaagaggtttcatattgctaatagcagctacaatccagctaccattctgcttttattttctggttgggataaggctggattattctgagtc |
| | caagctaggcccttttgctaatcttgttcatacctcttatcttcctcccacagctcctgggcaacctgctggtctctctgctggcccatcactttggcaaagcact |
| | agtgccaccatggcctctaggctgactctgctgactctgctgctcctgctgctggctggggacagggccagctctaaccccaatgctacttctagctcctctc |
| | aggaccctgagagcctgcaggacaggggggagggcaaggtggccaccactgtgatctctaagatgctgtttgtggagcccatcctggaggtgagcagc |
| | ctgcccaccaccaacagcaccaccaactctgccactaagatcactgccaacaccactgatgagcccaccacccagcccactactgagcccaccacccag |
| | cctactatccagcccacccagcccactacccagctgcccactgacagccctacccagcccaccactggcagcttctgccctgggcctgtgaccctgtgct |
| | ctgacctggagagccattctactgaggctgtgctgggggatgccctggtggacttctctctgaagctgtaccatgctttctctgccatgaagaaggtggaga |
| | ctaacatggcttttagccccttcagcattgctagcctgctgacccaggtgctgctgggggctggggagaacactaagaccaacctggaatctatcctgagct |
| | accccaaggacttcacctgtgtgcaccaggccctgaagggcttcaccaccaagggggtgacctctgtgagccagatcttccacagccctgacctggccat |
| | cagggatacttttgtgaatgccagcagaaccctgtactcttctagccccagggtgctgagcaataattctgatgctaacctggagctgatcaatacctgggtg |
| | gctaagaataccaacaacaagattagcaggctgctggactctctgccttctgataccaggctggtgctgctgaatgccatttacctgtctgccaagtggaaga |
| | ccacttttgaccctaagaagactaggatggagcctttccacttcaagaactctgtcattaaggtgcccatgatgaacagcaagaagtatcctgtggcccacttt |
| | attgaccagactctgaaggccaaggtgggccagctgcagctgagccataacctgagcctggtgatcctggtgccccagaacctgaagcataggctggag |
| | gacatggagcaggctctgagcccctctgtgttcaaggctattatggagaagctggagatgagcaagttccagcccactctgctgaccctgcccagaatcaa |
| | ggtgaccacctctcaggacatgctgagcatcatggaaaagctggagttctttgacttttcttatgacctgaatctgtgtggcctgactgaggatcctgatctgca |
| | ggtgtctgccatgcagcaccagactgtgctggagctgactgagactggggggaggctgctgctgcttctgccatctctgtggccaggaccctgctggtgtt |
| | tgaggtgcagcagcccttcctgtttgtgctgtgggaccagcagcacaagtttcctgtgttcatgggcagggtgtatgaccccagagcctgacatctagagct |
| | gaattcctgcagccagggggatcagcctctactgtgccttctagttgccagccatctgttgtttgcccctcccccttgccttccttgaccctggaaggtgccact |
| | cccactgtcctttcctaataaaatgaggaaattgcatcacattgtctgagtaggtgtcattctattctggggggtggggggggcaggacagcaagggggag |
| | gattgggaagacaatagcaggcatgctggggatgcagtgggctctatggcttctgaggcagaaagaaccagctggggctcgagatccactagggccgc |
| | aggaacccctagtgatggagttggccactccctctctgcgcgctcgctcgctcactgaggccgggcgaccaaaggtcgcccgacgcccgggctttgccc |
| | gggcggcctcagtgagcgagcgagcgcgcag |
| 67 | cctgcaggcagctgcgcgctcgctcgctcactgaggccgcccgggcaaagcccgggcggcctcagtgagcgagcgagcgcgcagagagggagtgg |
| | ccaactccatcactaggggttcctgcggcctagtactaggctcagaggcacacaggagtttctgggctcaccctgcccccttccaacccctcagttcccatc |
| | ctccagcagctgtttgtgtgctgcctctgaagtccacactgaacaaacttcagcctactcatgtccctaaaatgggcaaacattgcaagcagcaaacagcaa |
| | acacacagccctccctgcctgctgaccttggagctggggcagaggtcagagacctctctgggcccatgccacctccaacatccactcgaccccttggaatt |
| | tcggtggagaggagcagaggttgtcctggcgtggtttaggtagtgtgagaggggtacccggggatcttgctaccagtggaacagccactaaggattctgc |
| | agtgagagcagagggccagctaagtggtactctcccagagactgtctgactcacgccaccccctccaccttggacacaggacgctgtggtttctgagcca |
| | ggtacaatgactcctttcggtaagtgcagtggaagctgtacactgcccaggcaaagcgtccgggcagcgtaggcgggcgactcagatcccagccagtgg |
| | acttagcccctgtttgctcctccgataactggggtgaccttggttaatattcaccagcagcctcccccgttgcccctctggatccactgcttaaatacggacga |
| | ggacagggccctgtctcctcagcttcaggcaccaccactgacctgggacagtgaatagatcttgagaacttcagggtgagtctatgggacccttgatgttttc |
| | tttccccttcttttctatggttaagttcatgtcataggaaggggagaagtaacagggtacacatattgaccaaatcagggtaattttgcatttgtaattttaaaaaat |
| | gctttcttcttttaatatacttttttgtttatcttatttctaatactttccctaatctctttctttcagggcaataatgatacaatgtatcatgcctctttgcaccattctaaag |
| | aataacagtgataatttctgggttaaggcaatagcaatatttctgcatataaatatttctgcatataaattgtaactgatgtaagaggtttcatattgctaatagcag |
| | ctacaatccagctaccattctgcttttattttctggttgggataaggctggattattctgagtccaagctaggcccttttgctaatcttgttcatacctcttatcttcctc |
| | ccacagctcctgggcaacctgctggtctctctgctggcccatcactttggcaaagcactagtgccaccatggcctctaggctgactctgctgactctgctgct |
| | cctgctgctggctggggacagggccagctctaaccccaatgctacttctagctcctctcaggaccctgagagcctgcaggacaggggggagggcaaggt |
| | ggccaccactgtgatctctaagatgctgtttgtggagcccatcctggaggtgagcagcctgcccaccaccaacagcaccaccaactctgccactaagatca |
| | ctgccaacaccactgatgagcccaccacccagcccactactgagcccaccacccagcctactatccagcccacccagcccactacccagctgcccactg |
| | acagccctacccagcccaccactggcagcttctgccctgggcctgtgaccctgtgctctgacctggagagccattctactgaggctgtgctgggggatgcc |
| | ctggtggacttctctctgaagctgtaccatgctttctctgccatgaagaaggtggagactaacatggcttttagccccttcagcattgctagcctgctgaccca |
| | ggtgctgctgggggctggggagaacactaagaccaacctggaatctatcctgagctaccccaaggacttcacctgtgtgcaccaggccctgaagggcttc |
| | accaccaagggggtgacctctgtgagccagatcttccacagccctgacctggccatcagggatacttttgtgaatgccagcagaaccctgtactcttctagc |
| | cccagggtgctgagcaataattctgatgctaacctggagctgatcaatacctgggtggctaagaataccaacaacaagattagcaggctgctggactctctg |
| | ccttctgataccaggctggtgctgctgaatgccatttacctgtctgccaagtggaagaccacttttgaccctaagaagactaggatggagcctttccacttcaa |
| | gaactctgtcattaaggtgcccatgatgaacagcaagaagtatcctgtggcccactttattgaccagactctgaaggccaaggtgggccagctgcagctga |
| | gccataacctgagcctggtgatcctggtgccccagaacctgaagcataggctggaggacatggagcaggctctgagcccctctgtgttcaaggctattatg |
| | gagaagctggagatgagcaagttccagcccactctgctgaccctgcccagaatcaaggtgaccacctctcaggacatgctgagcatcatggaaaagctg |
| | gagttctttgacttttcttatgacctgaatctgtgtggcctgactgaggatcctgatctgcaggtgtctgccatgcagcaccagactgtgctggagctgactgag |
| | actggggtggaggctgctgctgcttctgccatctctgtggccaggaccctgctggtgtttgaggtgcagcagcccttcctgtttgtgctgtgggaccagcag |
| | cacaagtttcctgtgttcatgggcagggtgtatgaccccagagcctgacatctagagcacctctgcagcaggtctagaattcctgcagccagggggatcag |
| | cctctactgtgccttctagttgccagccatctgttgtttgcccctcccccttgccttccttgaccctggaaggtgccactcccactgtcctttcctaataaaatgag |
| | gaaattgcatcacattgtctgagtaggtgtcattctattctggggggggggtggggcaggacagcaagggggaggattgggaagacaatagcaggcatg |
| | ctggggatgcagtgggctctatggcttctgaggcagaaagaaccagctggggctcgagatccactagggccgcaggaacccctagtgatggagttggcc |
| | actccctctctgcgcgctcgctcgctcactgaggccgggcgaccaaaggtcgcccgacgcccgggctttgcccgggcggcctcagtgagcgagcgag |
| | cgcgcag |
| 68 | cctgcaggcagctgcgcgctcgctcgctcactgaggccgcccgggcaaagcccgggcggcctcagtgagcgagcgagcgcgcagagagggagtgg |
| | ccaactccatcactaggggttcctgcggcctagtactaggctcagaggcacacaggagtttctgggctcaccctgcccccttccaacccctcagttcccatc |
| | ctccagcagctgtttgtgtgctgcctctgaagtccacactgaacaaacttcagcctactcatgtccctaaaatgggcaaacattgcaagcagcaaacagcaa |
| | acacacagccctccctgcctgctgaccttggagctggggcagaggtcagagacctctctgggcccatgccacctccaacatccactcgaccccttggaatt |
| | tcggtggagaggagcagaggttgtcctggcgtggtttaggtagtgtgagaggggtacccggggatcttgctaccagtggaacagccactaaggattctgc |
| | agtgagagcagagggccagctaagtggtactctcccagagactgtctgactcacgccaccccctccaccttggacacaggacgctgtggtttctgagcca |
| | ggtacaatgactcctttcggtaagtgcagtggaagctgtacactgcccaggcaaagcgtccgggcagcgtaggcgggcgactcagatcccagccagtgg |
| | acttagcccctgtttgctcctccgataactggggtgaccttggttaatattcaccagcagcctcccccgttgcccctctggatccactgcttaaatacggacga |
| | ggacagggccctgtctcctcagcttcaggcaccaccactgacctgggacagtgaatagatcttgagaacttcagggtgagtctatgggacccttgatgttttc |
| | tttccccttcttttctatggttaagttcatgtcataggaaggggagaagtaacagggtacacatattgaccaaatcagggtaattttgcatttgtaattttaaaaaat |
| | gctttcttcttttaatatacttttttgtttatcttatttctaatactttccctaatctctttctttcagggcaataatgatacaatgtatcatgcctctttgcaccattctaaag |
| | aataacagtgataatttctgggttaaggcaatagcaatatttctgcatataaatatttctgcatataaattgtaactgatgtaagaggtttcatattgctaatagcag |
| | ctacaatccagctaccattctgcttttattttctggttgggataaggctggattattctgagtccaagctaggcccttttgctaatcttgttcatacctcttatcttcctc |
| | ccacagctcctgggcaacctgctggtctctctgctggcccatcactttggcaaagcactagtgccaccatggcctctaggctgactctgctgactctgctgct |
| | cctgctgctggctggggacagggccagctctaaccccaatgctacttctagctcctctcaggaccctgagagcctgcaggacaggggggagggcaaggt |
| | ggccaccactgtgatctctaagatgctgtttgtggagcccatcctggaggtgagcagcctgcccaccaccaacagcaccaccaactctgccactaagatca |
| | ctgccaacaccactgatgagcccaccacccagcccactactgagcccaccacccagcctactatccagcccacccagcccactacccagctgcccactg |
| | acagccctacccagcccaccactggcagcttctgccctgggcctgtgaccctgtgctctgacctggagagccattctactgaggctgtgctgggggatgcc |
| | ctggtggacttctctctgaagctgtaccatgctttctctgccatgaagaaggtggagactaacatggcttttagccccttcagcattgctagcctgctgaccca |
| | ggtgctgctgggggctggggagaacactaagaccaacctggaatctatcctgagctaccccaaggacttcacctgtgtgcaccaggccctgaagggcttc |
| | accaccaagggggtgacctctgtgagccagatcttccacagccctgacctggccatcagggatacttttgtgaatgccagcagaaccctgtactcttctagc |
| | cccagggtgctgagcaataattctgatgctaacctggagctgatcaatacctgggtggctaagaataccaacaacaagattagcaggctgctggactctctg |
| | ccttctgataccaggctggtgctgctgaatgccatttacctgtctgccaagtggaagaccacttttgaccctaagaagactaggatggagcctttccacttcaa |
| | gaactctgtcattaaggtgcccatgatgaacagcaagaagtatcctgtggcccactttattgaccagactctgaaggccaaggtgggccagctgcagctga |
| | gccataacctgagcctggtgatcctggtgccccagaacctgaagcataggctggaggacatggagcaggctctgagcccctctgtgttcaaggctattatg |
| | gagaagctggagatgagcaagttccagcccactctgctgaccctgcccagaatcaaggtgaccacctctcaggacatgctgagcatcatggaaaagctg |
| | gagttctttgacttttcttatgacctgaatctgtgtggcctgactgaggatcctgatctgcaggtgtctgccatgcagcaccagactgtgctggagctgactgag |
| | actggggtggaggctgctgctgcttctgccatctctgtggccaggaccctgctggtgtttgaggtgcagcagcccttcctgtttgtgctgtgggaccagcag |
| | cacaagtttcctgtgttcatgggcagggtgtatgaccccagagcctgacatctagagcacctctgcagcaggaagtctctgcagaagataacacctgcaga |
| | gtggtctagaattcctgcagccagggggatcagcctctactgtgccttctagttgccagccatctgttgtttgcccctcccccttgccttccttgaccctggaag |
| | gtgccactcccactgtcctttcctaataaaatgaggaaattgcatcacattgtctgagtaggtgtcattctattctggggggtggggggggcaggacagcaa |
| | gggggaggattgggaagacaatagcaggcatgctggggatgcagtgggctctatggcttctgaggcagaaagaaccagctggggctcgagatccacta |
| | gggccgcaggaacccctagtgatggagttggccactccctctctgcgcgctcgctcgctcactgaggccgggcgaccaaaggtcgcccgacgcccgg |
| | gctttgcccgggggcctcagtgagcgagcgagcgcgcag |
| 69 | cctgcaggcagctgcgcgctcgctcgctcactgaggccgcccgggcaaagcccgggcggcctcagtgagcgagcgagcgcgcagagagggagtgg |
| | ccaactccatcactaggggttcctgcggcctagtactaggctcagaggcacacaggagtttctgggctcaccctgcccccttccaacccctcagttcccatc |
| | ctccagcagctgtttgtgtgctgcctctgaagtccacactgaacaaacttcagcctactcatgtccctaaaatgggcaaacattgcaagcagcaaacagcaa |
| | acacacagccctccctgcctgctgaccttggagctggggcagaggtcagagacctctctgggcccatgccacctccaacatccactcgaccccttggaatt |
| | tcggtggagaggagcagaggttgtcctggcgtggtttaggtagtgtgagaggggtacccggggatcttgctaccagtggaacagccactaaggattctgc |
| | agtgagagcagagggccagctaagtggtactctcccagagactgtctgactcacgccaccccctccaccttggacacaggacgctgtggtttctgagcca |
| | ggtacaatgactcctttcggtaagtgcagtggaagctgtacactgcccaggcaaagcgtccgggcagcgtaggcgggcgactcagatcccagccagtgg |
| | acttagcccctgtttgctcctccgataactggggtgaccttggttaatattcaccagcagcctcccccgttgcccctctggatccactgcttaaatacggacga |
| | ggacagggccctgtctcctcagcttcaggcaccaccactgacctgggacagtgaatagatcttgagaacttcagggtgagtctatgggacccttgatgttttc |
| | tttccccttcttttctatggttaagttcatgtcataggaaggggagaagtaacagggtacacatattgaccaaatcagggtaattttgcatttgtaattttaaaaaat |
| | gctttcttcttttaatatacttttttgtttatcttatttctaatactttccctaatctctttctttcagggcaataatgatacaatgtatcatgcctctttgcaccattctaaag |
| | aataacagtgataatttctgggttaaggcaatagcaatatttctgcatataaatatttctgcatataaattgtaactgatgtaagaggtttcatattgctaatagcag |
| | ctacaatccagctaccattctgcttttattttctggttgggataaggctggattattctgagtccaagctaggcccttttgctaatcttgttcatacctcttatcttcctc |
| | ccacagctcctgggcaacctgctggtctctctgctggcccatcactttggcaaagcactagtgccaccatggcctctaggctgactctgctgactctgctgct |
| | cctgctgctggctggggacagggccagctctaaccccaatgctacttctagctcctctcaggaccctgagagcctgcaggacaggggggagggcaaggt |
| | ggccaccactgtgatctctaagatgctgtttgtggagcccatcctggaggtgagcagcctgcccaccaccaacagcaccaccaactctgccactaagatca |
| | ctgccaacaccactgatgagcccaccacccagcccactactgagcccaccacccagcctactatccagcccacccagcccactacccagctgcccactg |
| | acagccctacccagcccaccactggcagcttctgccctgggcctgtgaccctgtgctctgacctggagagccattctactgaggctgtgctgggggatgcc |
| | ctggtggacttctctctgaagctgtaccatgctttctctgccatgaagaaggtggagactaacatggcttttagccccttcagcattgctagcctgctgaccca |
| | ggtgctgctgggggctggggagaacactaagaccaacctggaatctatcctgagctaccccaaggacttcacctgtgtgcaccaggccctgaagggcttc |
| | accaccaagggggtgacctctgtgagccagatcttccacagccctgacctggccatcagggatacttttgtgaatgccagcagaaccctgtactcttctagc |
| | cccagggtgctgagcaataattctgatgctaacctggagctgatcaatacctgggtggctaagaataccaacaacaagattagcaggctgctggactctctg |
| | ccttctgataccaggctggtgctgctgaatgccatttacctgtctgccaagtggaagaccacttttgaccctaagaagactaggatggagcctttccacttcaa |
| | gaactctgtcattaaggtgcccatgatgaacagcaagaagtatcctgtggcccactttattgaccagactctgaaggccaaggtgggccagctgcagctga |
| | gccataacctgagcctggtgatcctggtgccccagaacctgaagcataggctggaggacatggagcaggctctgagcccctctgtgttcaaggctattatg |
| | gagaagctggagatgagcaagttccagcccactctgctgaccctgcccagaatcaaggtgaccacctctcaggacatgctgagcatcatggaaaagctg |
| | gagttctttgacttttcttatgacctgaatctgtgtggcctgactgaggatcctgatctgcaggtgtctgccatgcagcaccagactgtgctggagctgactgag |
| | actggggtggaggctgctgctgcttctgccatctctgtggccaggaccctgctggtgtttgaggtgcagcagcccttcctgtttgtgctgtgggaccagcag |
| | cacaagtttcctgtgttcatgggcagggtgtatgaccccagagcctgacatctagagcacctctgcagcaggtctagaattcctgcagccagggggatcag |
| | cctctactgtgccttctagttgccagccatctgttgtttgcccctcccccttgccttccttgaccctggaaggtgccactcccactgtcctttcctaataaaatgag |
| | gaaattgcatcacattgtctgagtaggtgtcattctattctggggggtggggggggcaggacagcaagggggaggattgggaagacaatagcaggcatg |
| | ctggggatgcagtgggctctatggcttctgaggcagaaagaaccagctggggctcgagatccactagggccgcaggaacccctagtgatggagttggcc |
| | actccctctctgcgcgctcgctcgctcactgaggccgggcgaccaaaggtcgcccgacgcccgggctttgcccgggcggcctcagtgagcgagcgag |
| | cgcgcag |
| 110 | atggctagcagactgactctgctgaccctgctgctgctgctgctggctggggacagggccagcagcaaccctaatgctacctctagctctagccaggacc |
| | ctgagagcctgcaggataggggggagggcaaggtggccaccactgtgatcagcaagatgctgtttgtggagcctatcctggaggtgagcagcctgccc |
| | accaccaactctactaccaactctgctaccaagatcactgccaataccactgatgaacccaccactcagcccactactgagcccaccacccagcccaccat |
| | tcagcccactcagcccactacccagctgcctactgactctcccacccagcccaccactggcagcttctgccctgggcctgtgaccctgtgctctgacctgg |
| | agagccattctactgaggctgtgctgggggatgccctggtggatttcagcctgaagctgtaccatgccttctctgccatgaagaaggtggagaccaacatg |
| | gccttctctcccttcagcattgccagcctgctgacccaggtgctgctgggggctggggagaacaccaagaccaacctggagagcatcctgtcttaccccaa |
| | ggacttcacctgtgtgcatcaggccctgaagggcttcactactaagggggtgacctctgtgtctcagattttccacagccctgacctggctattagggacact |
| | tttgtgaatgcttctaggaccctgtacagcagctctcccagggtgctgagcaacaactctgatgccaacctggagctgattaacacttgggtggccaagaac |
| | actaacaataagatcagcaggctgctggacagcctgccctctgacaccaggctggtgctgctgaatgccatctacctgtctgccaagtggaagactactttt |
| | gatcctaagaagaccaggatggagcctttccacttcaagaactctgtgatcaaggtgcccatgatgaattctaagaagtaccctgtggctcacttcattgacc |
| | agaccctgaaggccaaggtgggccagctgcagctgagccacaacctgagcctggtgattctggtgccccagaacctgaagcacaggctggaggacatg |
| | gagcaggccctgagcccctctgtgttcaaggccatcatggagaagctggagatgagcaagttccagcctactctgctgactctgcccaggatcaaggtga |
| | ccactagccaggacatgctgagcattatggagaagctggagttctttgacttttcttatgatctgaacctgtgtggcctgactgaggaccctgacctgcaggtg |
| | tctgccatgcagcaccagactgtgctggagctgactgagactggggggaggctgctgctgcctctgccatctctgtggctaggaccctgctggtgtttgag |
| | gtgcagcagcccttcctgtttgtgctgtgggaccagcagcacaagttccctgtcttcatgggcagggtgtatgatcccagggcttga |
| 119 | atggcctctaggctgactctgctgactctgctgctcctgctgctggctggggacagggccagctctaaccccaatgctacttctagctcctctcaggaccctg |
| | agagcctgcaggacaggggggagggcaaggtggccaccactgtgatctctaagatgctgtttgtggagcccatcctggaggtgagcagcctgcccacc |
| | accaacagcaccaccaactctgccactaagatcactgccaacaccactgatgagcccaccacccagcccactactgagcccaccacccagcctactatc |
| | cagcccacccagcccactacccagctgcccactgacagccctacccagcccaccactggcagcttctgccctgggcctgtgaccctgtgctctgacctgg |
| | agagccattctactgaggctgtgctgggggatgccctggtggacttctctctgaagctgtaccatgctttctctgccatgaagaaggtggagactaacatggc |
| | ttttagccccttcagcattgctagcctgctgacccaggtgctgctgggggctggggagaacactaagaccaacctggaatctatcctgagctaccccaagg |
| | acttcacctgtgtgcaccaggccctgaagggcttcaccaccaagggggtgacctctgtgagccagatcttccacagccctgacctggccatcagggatact |
| | tttgtgaatgccagcagaaccctgtactcttctagccccagggtgctgagcaataattctgatgctaacctggagctgatcaatacctgggtggctaagaata |
| | ccaacaacaagattagcaggctgctggactctctgccttctgataccaggctggtgctgctgaatgccatttacctgtctgccaagtggaagaccacttttga |
| | ccctaagaagactaggatggagcctttccacttcaagaactctgtcattaaggtgcccatgatgaacagcaagaagtatcctgtggcccactttattgaccag |
| | actctgaaggccaaggtgggccagctgcagctgagccataacctgagcctggtgatcctggtgccccagaacctgaagcataggctggaggacatgga |
| | gcaggctctgagcccctctgtgttcaaggctattatggagaagctggagatgagcaagttccagcccactctgctgaccctgcccagaatcaaggtgacca |
| | cctctcaggacatgctgagcatcatggaaaagctggagttctttgacttttcttatgacctgaatctgtgtggcctgactgaggatcctgatctgcaggtgtctg |
| | ccatgcagcaccagactgtgctggagctgactgagactggggggaggctgctgctgcttctgccatctctgtggccaggaccctgctggtgtttgaggtg |
| | cagcagcccttcctgtttgtgctgtgggaccagcagcacaagtttcctgtgttcatgggcagggtgtatgaccccagagcctga |
| 142 | atggctagcagactgactctgctgaccctgctgctgctgctgctggctggggacagggccagcagcaaccctaatgctacctctagctctagccaggacc |
| | ctgagagcctgcaggataggggggagggcaaggtggccaccactgtgatcagcaagatgctgtttgtggagcctatcctggaggtgagcagcctgccc |
| | accaccaactctactaccaactctgctaccaagatcactgccaataccactgatgaacccaccactcagcccactactgagcccaccacccagcccaccat |
| | tcagcccactcagcccactacccagctgcctactgactctcccacccagcccaccactggcagcttctgccctgggcctgtgaccctgtgctctgacctgg |
| | agagccattctactgaggctgtgctgggggatgccctggtggatttcagcctgaagctgtaccatgccttctctgccatgaagaaggtggagaccaacatg |
| | gccttctctcccttcagcattgccagcctgctgacccaggtgctgctgggggctggggagaacaccaagaccaacctggagagcatcctgtcttaccccaa |
| | ggacttcacctgtgtgcatcaggccctgaagggcttcactactaagggggtgacctctgtgtctcagattttccacagccctgacctggctattagggacact |
| | tttgtgaatgcttctaggaccctgtacagcagctctcccagggtgctgagcaacaactctgatgccaacctggagctgattaacacttgggtggccaagaac |
| | actaacaataagatcagcaggctgctggacagcctgccctctgacaccaggctggtgctgctgaatgccatctacctgtctgccaagtggaagactactttt |
| | gatcctaagaagaccaggatggagcctttccacttcaagaactctgtgatcaaggtgcccatgatgaattctaagaagtaccctgtggctcacttcattgacc |
| | agaccctgaaggccaaggtgggccagctgcagctgagccacaacctgagcctggtgattctggtgccccagaacctgaagcacaggctggaggacatg |
| | gagcaggccctgagcccctctgtgttcaaggccatcatggagaagctggagatgagcaagttccagcctactctgctgactctgcccaggatcaaggtga |
| | ccactagccaggacatgctgagcattatggagaagctggagttctttgacttttcttatgatctgaacctgtgtggcctgactgaggaccctgacctgcaggtg |
| | tctgccatgcagcaccagactgtgctggagctgactgagactggggggaggctgctgctgcctctgccatctctgtggctaggaccctgctggtgtttgag |
| | gtgcagcagcccttcctgtttgtgctgtgggaccagcagcacaagttccctgtcttcatgggcagggtgtatgatcccagggcttga |
| 181 | NPNATSSSSQDPESLQDRGEGKVATTVISKMLFVEPILEVSSLPTTNSTTNSATKITANTTDEPTTQP |
| | TTEPTTQPTIQPTQPTTQLPTDSPTQPTTGSFCPGPVTLCSDLESHSTEAVLGDALVDFSLKLYHAFS |
| | AMKKVETNMAFSPFSIASLLTQVLLGAGENTKTNLESILSYPKDFTCVHQALKGFTTKGVTSVSQI |
| | FHSPDLAIRDTFVNASRTLYSSSPRVLSNNSDANLELINTWVAKNTNNKISRLLDSLPSDTRLVLLN |
| | AIYLSAKWKTTFDPKKTRMEPFHFKNSVIKVPMMNSKKYPVAHFIDQTLKAKVGQLQLSHNLSL |
| | VILVPQNLKHRLEDMEQALSPSVFKAIMEKLEMSKFQPTLLTLPRIKVTTSQDMLSIMEKLEFFDFS |
| | YDLNLCGLTEDPDLQVSAMQHQTVLELTETGVEAAAASAISVARTLLVFEVQQPFLFVLWDQQH |
| | KFPVFMGRVYDPRA |
| 192 | MASRLTLLTLLLLLLAGDRASSNPNATSSSSQDPESLQDRGEGKVATTVISKMLFVEPILEVSSLPT |
| | TNSTTNSATKITANTTDEPTTQPTTEPTTQPTIQPTQPTTQLPTDSPTQPTTGSFCPGPVTLCSDLESH |
| | STEAVLGDALVDFSLKLYHAFSAMKKVETNMAFSPFSIASLLTQVLLGAGENTKTNLESILSYPKD |
| | FTCVHQALKGFTTKGVTSVSQIFHSPDLAIRDTFVNASRTLYSSSPRVLSNNSDANLELINTWVAK |
| | NTNNKISRLLDSLPSDTRLVLLNAIYLSAKWKTTFDPKKTRMEPFHFKNSVIKVPMMNSKKYPVA |
| | HFIDQTLKAKVGQLQLSHNLSLVILVPQNLKHRLEDMEQALSPSVFKAIMEKLEMSKFQPTLLTLP |
| | RIKVTTSQDMLSIMEKLEFFDFSYDLNLCGLTEDPDLQVSAMQHQTVLELTETGVEAAAASAISV |
| | ARTLLVFEVQQPFLFVLWDQQHKFPVFMGRVYDPRA |
| 226 | MAADGYLPDWLEDNLSEGIREWWDLKPGAPKPKANQQKQDNGRGLVLPGYKYLGPFNGLDKG |
| | EPVNAADAAALEHDKAYDQQLQAGDNPYLRYNHADAEFQERLQEDTSFGGNLGRAVFQAKKR |
| | VLEPLGLVESPVKTAPGKKRPVEPSPQRSPDSSTGIGKKGQQPAKKRLNFGQTGDSESVPDPQPIGE |
| | PPAAPSGVGPNTMAAGGGAPMADNNEGADGVGSSSGNWHCDSTWLGDRVITTSTRTWALPTYN |
| | NHLYKQISNGTSGGSTNDNTYFGYSTPWGYFDFNRFHCHFSPRDWQRLINNNWGFRPKRLNFKLF |
| | NIQVKEVTQNEGTKTIANNLTSTIQVFTDSEYQLPYVLGSAHQGCLPPFPADVFMIPQYGYLTLNN |
| | GSQAVGRSSFYCLEYFPSQMLRTGNNFEFSYNFEDVPFHSSYAHSQSLDRLMNPLIDQYLYYLSRT |
| | QSTGGTAGTQQLLFSQAGPNNMSAQAKNWLPGPCYRQQRVSTTLSQNNNSNFAWTGATKYHLN |
| | GRDSLVNPGVAMATHKDDEERFFPSSGVLMFGKQGAGKDNVDYSSVMLTSEEEIKTTNPVATEQ |
| | YGVVADNLQQQNAAPIVGAVNSQGALPGMVWQNRDVYLQGPIWAKIPHTDGNFHPSPLMGGFG |
| | LKHPPPQILIKNTPVPADPPTTFNQAKLASFITQYSTGQVSVEIEWELQKENSKRWNPEIQYTSNYY |
| | KSTNVDFAVNTEGTYSEPRPIGTRYLTRNL |
| 229 | cctgcaggcagctgcgcgctcgctcgctcactgaggccgcccgggcaaagcccgggcggcctcagtgagcgagcgagcgcgcagagagggagtgg |
| | ccaactccatcactaggggttcctgcggcctagtactaggctcagaggcacacaggagtttctgggctcaccctgcccccttccaacccctcagttcccatc |
| | ctccagcagctgtttgtgtgctgcctctgaagtccacactgaacaaacttcagcctactcatgtccctaaaatgggcaaacattgcaagcagcaaacagcaa |
| | acacacagccctccctgcctgctgaccttggagctggggcagaggtcagagacctctctgggcccatgccacctccaacatccactcgaccccttggaatt |
| | tcggtggagaggagcagaggttgtcctggcgtggtttaggtagtgtgagaggggtacccggggatcttgctaccagtggaacagccactaaggattctgc |
| | agtgagagcagagggccagctaagtggtactctcccagagactgtctgactcacgccaccccctccaccttggacacaggacgctgtggtttctgagcca |
| | ggtacaatgactcctttcggtaagtgcagtggaagctgtacactgcccaggcaaagcgtccgggcagcgtaggcgggcgactcagatcccagccagtgg |
| | acttagcccctgtttgctcctccgataactggggtgaccttggttaatattcaccagcagcctcccccgttgcccctctggatccactgcttaaatacggacga |
| | ggacagggccctgtctcctcagcttcaggcaccaccactgacctgggacagtgaatagatcctgagaacttcagggtgagtctttgggacccttgttgttttc |
| | tttccccttcttttctttggttaagttcttgtcataggaaggggagaagtaacagggtacacatattgaccaaatcagggtaattttgcatttgtaattttaaaaattg |
| | ctttcttcttttaatatacttttttgtttatcttatttctaatactttccctaatctctttctttcagggcaatattgatacattgtatcttgcctctttgcaccattctaaagaat |
| | aacagtgataatttctgggttaaggcaatagcaatatttctgcatataaatatttctgcatataaattgtaactgttgtaagaggtttcatattgctaatagcagctac |
| | aatccagctaccattctgcttttattttctggttgggataaggctggattattctgagtccaagctaggcccttttgctaatcttgttcatacctcttatcttcctccca |
| | cagctcctgggcaacctgctggtctctctgctggcccatcactttggcaaagcactagtgccaccatggcctctaggctgactctgctgactctgctgctcct |
| | gctgctggctggggacagggccagctctaaccccaatgctacttctagctcctctcaggaccctgagagccttcaggacaggggggagggcaaggtgg |
| | ccaccactgtgatctctaagatgctgtttgtggagcccatcctggaggtgagcagcctgcccaccaccaacagcaccaccaactctgccactaagatcact |
| | gccaacaccactgatgagcccaccacccagcccactactgagcccaccacccagcctactatccagcccacccagcccactacccagctgcccactga |
| | cagccctacccagcccaccactggcagcttctgccctgggcctgtgaccctgtgctctgacctggagagccattctactgaggctgtgctgggggatgccc |
| | tggtggacttctctctgaagctgtaccatgctttctctgccatgaagaaggtggagactaacatggcttttagccccttcagcattgctagcctgctgacccag |
| | gtgctgctgggggctggggagaacactaagaccaacctggaatctatcctgagctaccccaaggacttcacctgtgtgcaccaggccctgaagggcttca |
| | ccaccaagggggtgacctctgtgagccagatcttccacagccctgacctggccatcagggatacttttgtgaatgccagcagaaccctgtactcttctagcc |
| | ccagggtgctgagcaataattctgatgctaacctggagctgatcaatacctgggtggctaagaataccaacaacaagattagcaggctgctggactctctgc |
| | cttctgataccaggctggtgctgctgaatgccatttacctgtctgccaagtggaagaccacttttgaccctaagaagactaggatggagcctttccacttcaag |
| | aactctgtcattaaggtgcccatgatgaacagcaagaagtatcctgtggcccactttattgaccagactctgaaggccaaggtgggccagcttcagctgagc |
| | cataacctgagcctggtgatcctggtgccccagaacctgaagcataggctggaggacatggagcaggctctgagcccctctgtgttcaaggctattatgga |
| | gaagctggagatgagcaagttccagcccactctgctgaccctgcccagaatcaaggtgaccacctctcaggacatgctgagcatcatggaaaagctgga |
| | gttctttgacttttcttatgacctgaatctgtgtggcctgactgaggatcctgatcttcaggtgtctgccatgcagcaccagactgtgctggagctgactgagact |
| | ggggtggaggctgctgctgcttctgccatctctgtggccaggaccctgctggtgtttgaggtgcagcagcccttcctgtttgtgctgtgggaccagcagcac |
| | aagtttcctgtgttcatgggcagggtgtatgaccccagagcctgaagatctagagctgaattccttcagccagggggatcagcctctactgtgccttctagttg |
| | ccagccatctgttgtttgcccctcccccttgccttccttgaccctggaaggtgccactcccactgtcctttcctaataaaatgaggaaattgcatcacattgtctg |
| | agtaggtgtcattctattctggggggtggggggggcaggacagcaagggggaggattgggaagacaatagcaggcatgctggggatgcagtgggctc |
| | tatggcttctgaggcagaaagaaccagctggggctcgagatccactagggccgcaggaacccctagtgatggagttggccactccctctctgcgcgctcg |
| | ctcgctcactgaggccgggcgaccaaaggtcgcccgacgcccgggctttgcccgggcggcctcagtgagcgagcgagcgcgcagctgcctgcaggg |
| | gcccatgggcagatgcaccacctgtctcagtgcaaagccctgcctaagtaggctggtcataagaccatgtgtctggctgtaactccaattgattgtcagcatc |
| | aataaaacttggccaacactgttatatactggtattgatagttacaactgaacatatttgtttaagcaattggaattaagaattcacatgcaatgatatcagggtcc |
| | ttctcctctggttagtgtattggggggaaattggacatctctcagctcagtaggctagttaggccaggatggatgacatccacagcccctgggcagagagatt |
| | atgatgtagctagtctgactcctgacaaagacttgcttcctggagcttctactactttctggtggatggctaagaaatatggttgtgttcttttaagtctgaagagc |
| | attatttttgccaacccctgaccaaacatccttgccaaggaaaaggcctaaaatatatttgcatttaaagatattacaaactacttggttttggaatgtttggccttt |
| | caggatcatagctatcaaaatattagctatttggggtatgagatgtctgcttggtcaaggacaagttcttaaagacatcatgttggggaataatggggaaaatg |
| | ggaaggcttatgctctgagtaagacatctgagttatcatctgtcaaacatttttgttagtcatagtctaatgggagcctgttttccctctttaatatacattcacatct |
| | gaatttatgctcttcattgacaatgccagcccagaacaacagctcttaccctttggttttcttcctaacctttaactccaatgtaaccattacctgccatttcagtaa |
| | aaccattattctccctacttacccacccaagttgtacaataaagagtgtttgctctcactcatatacaaagcaaattcatttgtttgtgatgtacagcttgctatgcc |
| | cacagatgtggtttgcctagtcctttgctctaggtcatttgactgggaacagatgggatgctcactttggtttttaatggttaatctagtcattgaaatgcatttcatc |
| | aaataatcttagaggataattgtttaaatgtctgtccagactagctttgtagagccaggtgccattacacatgtcaccttcttatttctcttaattgaatttttatcatct |
| | gagataggaataatagagggctttttcaagtgaagatattactatagtctaaagaccttagtgtaacatcctggcccctaaggaaaaacaagttctggttcata |
| | catataataactttgcatgttatctgccactgagatgtgtcctaatccaacagaaaggattgaatctctgtagctaggtgtacagggcaagagctgtacaggga |
| | acctttaaagatagcttcaggccaaagctgaggaaagtggatggagactggggaaaatgctaagacattttaaagattttctttaggtcaaaaatagaataag |
| | aaatagaccatttccctggacattttctgtaggttaatactgttgaactattggtaaatgcttatgctacaacttaatatgtctgctttgtgagtttagcattgtctcctt |
| | gtcattccagaaatgaaatggcaaatacatttaaatcagaactaaaaaggggaacagggtataaaggctcaatttagtcacatcatttccctttctcacccacc |
| | ccctttaaaccagatgtttgccaatgcattaacaatgcagatgtttcctgaaagaaagtttagtaactcaagcagacaccttattttcttttcaagcagaaaagac |
| | tatgagatggtggttgtggttgttctgggagggagaagatataaatgatacacattatttcaaatcatttcatgacctcactgcacacttatagttattgtacctgtt |
| | gtctttttgctgtcaagcctagctaagatcatttggaatgttcaagatcactcatacatgcatgtgcacacatacacatgcacatatgttcactccctatttcatcca |
| | catgaactaagattactgatgtgtacagattcaaagcacttttattcttttccaaaggcaagaagctgagctactttccagaatagttgtgaaagaccctgtcata |
| | cttctgcattgtttcctccacaccacctccatccagttccttatgaatggttactggttttcaaaaatatgagataaattgagtgtataaaagtcatttttagacaaaa |
| | tgaaacaggaaatgaaagaaaccagaatctctcctcatttgtggatgggccagctccaccatgtcatggttaatctgcagggaggaaatactagatttgattg |
| | cagatcagactgcagcaaacctgctgtgactaaggcatcaagagaaagcaagcaacagctggggcttcagtggtgaaaacattatatatctagctttgaaat |
| | atgaaatactgtttagcagtgtcacctagaaaagagtgtttcaaaatgctgatgcttcataagaacctttctcttcagagttgtttcttttatctttcaaattagccag |
| | ggtgggaaataaagtgatcacttggtgaagaaatctcacaaagaagaacatagagagttcactttcatctggagtaatgaacagattgaacaaactagaaat |
| | ggttagtctgttaaagaaaaggtgtaggtgagctgtttgcaagagccacaagggaaaggggaagacaacttctttgtggacttaagggtgaaagttgcaag |
| | caggcaagaccattctgacctccattaagaaagccctttccaaccaacaaccactgggttggttactcaggttgggcagcattgggagcaaatgttgattga |
| | acaaatgtttgtcagaattgttgacttaaagagctgttctgtcactggggacagcagcagctagatagccccattcagggagagggcatttgttcacctggcc |
| | agagatcagagcaggctaagggactgctgggatcctgtccagctttgagaccctacagagccatgttcacctagcaggtatcccttctgaggtcactctcat |
| | ttcttaccttattccagggctttcacctcagcttgccaggctggagccaagggccaaggcagcctcaccttgttggctatggtagcttcccaggagcccccta |
| | tggttcaggaacagctctgcctgccccatcctgtttgctacctcctaaagccaaaggcactggtgggccaggccagcttctaaagtcacacaaggttagaa |
| | ggttcctgacaggaagggcttgaggccaatggaaggaggtacttcagtttccctccagatgcccagtgatgggctcagagctccttgagaacttgggaaa |
| | ggaagcagggtctctgaagaaatacttcaggagtagaaagaggaagctagagggttaaatgcactacacaggaacagaaatgagtttttcttagagttagt |
| | atatgtcttagaggtgtagtaaactaaaacaagtcttgaattgcatacagccacttagggaagaaatgaaaacctttgaatattagtgaaaaaagggaaactg |
| | caacccctgtattactagatagctttcatcaacagctcaaaacagacagatttttataggtttactgtgtgcactttaatacaagggcagtggttcagaacttagt |
| | caggtcctgaaaaggatttaccaaatgttgagtgtgccctctagtgttcacacttcccagctttcttcctataaaggtggatcaaggcacttgcttacaactgga |
| | actgaaatcctccaagtggaactagacattgagatggagaaaatattcattgtccactgtaattatgcaaggaatatccagttgagataatggacttgcctctta |
| | tctaataatacccaggctcaatgggtcactgctttgtccactttgcccaaaattcaagcacagctaagttgatattttaggacaaaggcagcttactatccagcc |
| | agaggggagtagaatatggttaagagagagtggaaagaatgaatgagccctgctattcctcactgcctggatggctataagcacagcccttatggaggcct |
| | taggtcttgcttcataatattccagtttgaaaagggtttgaaaagacctcctagaaaaatcagtagtttttctcttttgagtaacatgtagcaaaaaaaatttcatca |
| | tgtaggtacagggaacaccctaataactattaatctcaaggagtcaagccagtgtgtttcctaatgtatctgctgtatccccatgaagcaaattttgccatcaga |
| | gaaactgactcatggggaaaaaatccaaggacctcaaatcaccaaaagaagccattcctcagatttgcctaagcttaagcttccctgtctctcattgtgtgttg |
| | ctttcaatgcagttacataaatggcttttttgtttatgcaccaaaaacactaattcatctgcaaagctataggtcaaagcaaccatagtatgcaccctgctagctg |
| | gcgcattaagcgcggcgggtgtggtggttacgcgcagcgtgaccgctacacttgccagcgccttagcgcccgctcctttcgctttcttcccttcctttctcgc |
| | cacgttcgccggctttccccgtcaagctctaaatcgggggctccctttagggttccgatttagtgctttacggcacctcgaccccaaaaaacttgatttgggtg |
| | atggttcacgtagtgggccatcgccctgatagacggtttttcgccctttgacgttggagtccacgttctttaatagtggactcttgttccaaactggaacaacact |
| | caactctatctcgggctattcttttgatttagacctgcaggcatgcaagcttggcactggccgtcgttttacaacgtcgtgactgggaaaaccctggcgttacc |
| | caacttaatcgccttgcagcacatccccctttcgccagctggcgtaatagcgaagaggcccgcaccgatcgcccttcccaacagttgcgcagcctgaatgg |
| | cgaatgcgatttattcaacaaagccgccgtcccgtcaagtcagcgtaatgctctgccagtgttacaaccaattaaccaattctgattagaaaaactcatcgag |
| | catcaaatgaaactgcaatttattcatatcaggattatcaataccatatttttgaaaaagccgtttctgtaatgaaggagaaaactcaccgaggcagttccatag |
| | gatggcaagatcctggtatcggtctgcgattccgactcgtccaacatcaatacaacctattaatttcccctcgtcaaaaataaggttatcaagtgagaaatcac |
| | catgagtgacgactgaatccggtgagaatggcaaaagcttatgcatttctttccagacttgttcaacaggccagccattacgctcgtcatcaaaatcactcgc |
| | atcaaccaaaccgttattcattcgtgattgcgcctgagcgagacgaaatacgcgatcgctgttaaaaggacaattacaaacaggaatcgaatgcaaccggc |
| | gcaggaacactgccagcgcatcaacaatattttcacctgaatcaggatattcttctaatacctggaatgctgttttcccggggatcgcagtggtgagtaaccat |
| | gcatcatcaggagtacggataaaatgcttgatggtcggaagaggcataaattccgtcagccagtttagtctgaccatctcatctgtaacatcattggcaacgc |
| | tacctttgccatgtttcagaaacaactctggcgcatcgggcttcccatacaatcgatagattgtcgcacctgattgcccgacattatcgcgagcccatttatacc |
| | catataaatcagcatccatgttggaatttaatcgcggcttcgagcaagacgtttcccgttgaatatggctcataacaccccttgtattactgtttatgtaagcaga |
| | cagttttattgttcatgatgatatatttttatcttgtgcaatgtaacatcagagattttgagacacaacgtggctttgttgaataaatcgaacttttgctgagttgaagg |
| | atcagatcacgcatcttcccgacaacgcagaccgttccgtggcaaagcaaaagttcaaaatcaccaactggtccacctacaacaaagctctcatcaaccgt |
| | ggctccctcactttctggctggatgatggggcgattcaggcctggtatgagtcagcaacaccttcttcacgaggcagacctctcgacggagttccactgagc |
| | gtcagaccccgtagaaaagatcaaaggatcttcttgagatcctttttttctgcgcgtaatctgctgcttgcaaacaaaaaaaccaccgctaccagcggtggttt |
| | gtttgccggatcaagagctaccaactctttttccgaaggtaactggcttcagcagagcgcagataccaaatactgttcttctagtgtagccgtagttaggccac |
| | cacttcaagaactctgtagcaccgcctacatacctcgctctgctaatcctgttaccagtggctgctgccagtggcgataagtcgtgtcttaccgggttggactc |
| | aagacgatagttaccggataaggcgcagcggtcgggctgaacggggggttcgtgcacacagcccagcttggagcgaacgacctacaccgaactgaga |
| | tacctacagcgtgagctatgagaaagcgccacgcttcccgaagggagaaaggcggacaggtatccggtaagcggcagggtcggaacaggagagcgc |
| | acgagggagcttccagggggaaacgcctggtatctttatagtcctgtcgggtttcgccacctctgacttgagcgtcgatttttgtgatgctcgtcaggggggc |
| | ggagcctatggaaaaacgccagcaacgcggcctttttacggttcctggccttttgctggccttttgctcacatgt |
| 232 | aatccaaatgctaccagctccagctcccaggatccagagagtttgcaagacagaggcgaagggaaggtcgcaacaacagttatctccaagatgctattcg |
| | ttgaacccatcctggaggtttccagcttgccgacaaccaactcaacaaccaattcagccaccaaaataacagctaataccactgatgaacccaccacacaa |
| | cccaccacagagcccaccacccaacccaccatccaacccacccaaccaactacccagctcccaacagattctcctacccagcccactactgggtccttct |
| | gcccaggacctgttactctctgctctgacttggagagtcattcaacagaggccgtgttgggggatgctttggtagatttctccctgaagctctaccacgccttct |
| | cagcaatgaagaaggtggagaccaacatggccttttccccattcagcatcgccagcctccttacccaggtcctgctcggggctggggagaacaccaaaac |
| | aaacctggagagcatcctctcttaccccaaggacttcacctgtgtccaccaggccctgaagggcttcacgaccaaaggtgtcacctcagtctctcagattttc |
| | cacagcccagacctggccataagggacacctttgtgaatgcctctcggaccctgtacagcagcagccccagagtcctaagcaacaacagtgacgccaac |
| | ttggagctcatcaacacctgggtggccaagaacaccaacaacaagatcagccggctgctagacagtctgccctccgatacccgccttgtcctcctcaatgc |
| | tatctacctgagtgccaagtggaagacaacatttgatcccaagaaaaccagaatggaaccctttcacttcaaaaactcagttataaaagtgcccatgatgaat |
| | agcaagaagtaccctgtggcccatttcattgaccaaactttgaaagccaaggtggggcagctgcagctctcccacaatctgagtttggtgatcctggtaccc |
| | cagaacctgaaacatcgtcttgaagacatggaacaggctctcagcccttctgttttcaaggccatcatggagaaactggagatgtccaagttccagcccact |
| | ctcctaacactaccccgcatcaaagtgacgaccagccaggatatgctctcaatcatggagaaattggaattcttcgatttttcttatgaccttaacctgtgtggg |
| | ctgacagaggaccctgatcttcaggtttctgcgatgcagcaccagacagtgctggaactgacagagactggggggaggcggctgcagcctccgccatc |
| | tctgtggcccgcaccctgctggtctttgaagtgcagcagcccttcctcttcgtgctctgggaccagcagcacaagttccctgtcttcatggggcgagtatatg |
| | accccagggcctga |
| 233 | aaccctaatgctacctctagctctagccaggaccctgagagcctgcaggataggggggagggcaaggtggccaccactgtgatcagcaagatgctgtttg |
| | tggagcctatcctggaggtgagcagcctgcccaccaccaactctactaccaactctgctaccaagatcactgccaataccactgatgaacccaccactcag |
| | cccactactgagcccaccacccagcccaccattcagcccactcagcccactacccagctgcctactgactctcccacccagcccaccactggcagcttttg |
| | tcctggccctgtgaccctgtgctctgacctggagagccattctactgaggctgtgctgggggatgccctggtggacttcagcctgaagctgtaccatgccttc |
| | tctgccatgaagaaggtggagaccaacatggccttcagccccttctctattgcctctctgctgacccaggtgctgctgggggctggggagaatactaagac |
| | caacctggagagcattctgagctatcccaaggacttcacctgtgtgcaccaggccctgaaggggttcactactaaaggggtgacctctgtgtctcagatctt |
| | ccacagccctgacctggccatcagggacacttttgtgaatgccagcaggaccctgtacagcagcagccccagagtgctgagcaataattctgatgctaatc |
| | tggagctgattaacacttgggtggccaagaacaccaacaacaagatctctaggctgctggattctctgccctctgacaccaggctggtgctgctgaatgcca |
| | tctatctgtctgccaagtggaagaccacctttgatcccaagaagaccaggatggagcccttccatttcaagaactctgtgattaaagtgcccatgatgaactct |
| | aagaagtatcctgtggcccacttcattgatcagactctgaaggccaaggtggggcagctgcagctgagccacaacctgagcctggtgatcctggtgcccc |
| | agaatctgaagcacaggctggaggacatggagcaggccctgagcccctctgtgttcaaggccatcatggagaagctggagatgagcaagttccagccc |
| | accctgctgactctgcccagaattaaggtgaccaccagccaggacatgctgagcatcatggagaagctggagttctttgacttctcttatgacctgaacctgt |
| | gtggcctgactgaggatcctgacctgcaggtgtctgccatgcagcaccagactgtgctggagctgactgagactggggggaggctgctgctgcctctgc |
| | catttctgtggccaggaccctgctggtgtttgaggtgcagcagcccttcctgtttgtgctgtgggaccagcagcacaagtttcctgtgtttatgggcagggtgt |
| | atgaccctagggcctga |
| 234 | aaccctaatgccacctccagcagcagccaggaccctgagagcctgcaggataggggggagggcaaggtggctactactgtgatcagcaagatgctgttt |
| | gtggagcctatcctggaggtgagcagcctgcccaccactaactctactactaattctgccactaagatcactgccaataccactgatgagccaaccactcag |
| | cccaccactgagcccaccacccagcccaccattcagcccactcagcctaccacccagctgcctactgacagccccactcagcccactactggctctttctg |
| | tcctgggcctgtgactctgtgctctgacctggaatcccacagcactgaggctgtgctgggggatgccctggtggatttcagcctgaagctgtaccatgctttc |
| | tctgccatgaagaaggtggagaccaacatggccttcagccctttctctattgccagcctgctgactcaggtgctgctgggggctggggagaataccaagac |
| | caacctggagtctatcctgagctatcccaaggacttcacttgtgtgcaccaggccctgaaggggttcaccaccaagggggtgacctctgtgtctcagatcttt |
| | cacagccctgacctggccatcagggatacctttgtgaatgccagcaggaccctgtacagcagcagccccagggtgctgagcaacaactctgatgccaac |
| | ctggagctgatcaacacctgggtggccaagaacaccaacaacaagatcagcaggctgctggacagcctgccctctgataccaggctggtgctgctgaat |
| | gccatctacctgtctgctaagtggaagaccacttttgatcctaagaagaccaggatggagccctttcacttcaagaactctgtgatcaaggtgcccatgatga |
| | actctaagaaataccctgtggcccacttcattgatcagaccctgaaggccaaggtgggccagctgcagctgagccacaacctgagcttggtgatcctggtg |
| | cctcagaacctgaagcacaggctggaggacatggagcaggccctgagcccctctgtgttcaaggccattatggagaagctggagatgagcaagttccag |
| | cctaccctgctgaccctgcccaggatcaaggtgactactagccaggatatgctgagcatcatggagaagctggagttttttgatttcagctatgacctgaacc |
| | tgtgtggcctgactgaggaccctgacctgcaggtgtctgccatgcagcatcagactgtgctggagctgactgagactggggggaggctgctgctgcctct |
| | gccatctctgtggccaggaccctgctggtgtttgaggtgcagcagcctttcctgtttgtgctgtgggatcagcagcacaagtttcctgtgttcatgggcagggt |
| | gtatgaccccagggcttga |
| 235 | aaccctaatgctacctctagctctagccaggaccctgagagcctgcaggataggggggagggcaaggtggccaccactgtgatcagcaagatgctgtttg |
| | tggagcctatcctggaggtgagcagcctgcccaccaccaactctactaccaactctgctaccaagatcactgccaataccactgatgaacccaccactcag |
| | cccactactgagcccaccacccagcccaccattcagcccactcagcccactacccagctgcctactgactctcccacccagcccaccactgggagcttct |
| | gtccaggccctgtgactctgtgttctgacctggagagccacagcactgaagctgtgctgggggatgctctggtggacttcagcctgaagctgtaccatgcct |
| | tctctgccatgaagaaggtggaaaccaacatggcctttagccccttcagcattgctagcctgctgactcaggtgctgctgggggctggggagaacactaag |
| | actaacctggagtctatcctgtcttatcccaaggacttcacctgtgtgcatcaggccctgaaggggttcaccaccaagggggtcacctctgtgagccagatct |
| | ttcacagccctgatctggccatcagggacacctttgtgaatgcctctaggactctgtacagcagcagccccagggtgctgagcaacaactctgatgccaac |
| | ctggagctgatcaacacctgggtggccaagaacactaacaacaagatcagcaggctgctggacagcctgccctctgacactaggctggtgctgctgaatg |
| | ccatctatctgtctgccaagtggaagaccacctttgaccccaagaagactaggatggagccctttcattttaagaactctgtgatcaaggtgcccatgatgaa |
| | cagcaagaaataccctgtggcccatttcattgaccagactctgaaggctaaggtgggccagctgcagctgagccacaacctgagcctggtgatcctggtg |
| | ccacagaatctgaagcacaggctggaggacatggagcaggctctgtctccctctgtgttcaaggccatcatggagaagctggagatgtctaagttccagcc |
| | caccctgctgaccctgcccaggatcaaggtgaccacttctcaggacatgctgtctatcatggagaagctggagttttttgacttttcttatgacctgaacctgtg |
| | tggcctgactgaggaccctgatctgcaggtgtctgccatgcagcaccagactgtgctggagctgactgagactggggggaggctgctgctgcttctgcca |
| | tttctgtggctaggactctgctggtgtttgaggtgcagcagcccttcctgtttgtgctgtgggaccagcagcacaagttccctgtgttcatgggcagggtgtat |
| | gatcccagggcttga |
| 236 | aaccctaatgctacctctagctctagccaggaccctgagagcctgcaggataggggggagggcaaggtggccaccactgtgatcagcaagatgctgtttg |
| | tggagcctatcctggaggtgagcagcctgcccaccaccaactctactaccaactctgctaccaagatcactgccaataccactgatgaacccaccactcag |
| | cccactactgagcccaccacccagcccaccattcagcccactcagcccactacccagctgcctactgactctcccacccagcccaccactggcagcttct |
| | gccctgggcctgtgaccctgtgctctgacctggagagccattctactgaggctgtgctgggggatgccctggtggatttcagcctgaagctgtaccatgcct |
| | tctctgccatgaagaaggtggagaccaacatggccttctctcccttcagcattgccagcctgctgacccaggtgctgctgggggctggggagaacaccaa |
| | gaccaacctggagagcatcctgtcttaccccaaggacttcacctgtgtgcatcaggccctgaagggcttcactactaagggggtgacctctgtgtctcagat |
| | tttccacagccctgacctggctattagggacacttttgtgaatgcttctaggaccctgtacagcagctctcccagggtgctgagcaacaactctgatgccaac |
| | ctggagctgattaacacttgggggccaagaacactaacaataagatcagcaggctgctggacagcctgccctctgacaccaggctggtgctgctgaatg |
| | ccatctacctgtctgccaagtggaagactacttttgatcctaagaagaccaggatggagcctttccacttcaagaactctgtgatcaaggtgcccatgatgaat |
| | tctaagaagtaccctgtggctcacttcattgaccagaccctgaaggccaaggtgggccagctgcagctgagccacaacctgagcctggtgattctggtgcc |
| | ccagaacctgaagcacaggctggaggacatggagcaggccctgagcccctctgtgttcaaggccatcatggagaagctggagatgagcaagttccagc |
| | ctactctgctgactctgcccaggatcaaggtgaccactagccaggacatgctgagcattatggagaagctggagttctttgacttttcttatgatctgaacctgt |
| | gtggcctgactgaggaccctgacctgcaggtgtctgccatgcagcaccagactgtgctggagctgactgagactggggtggaggctgctgctgcctctgc |
| | catctctgtggctaggaccctgctggtgtttgaggtgcagcagcccttcctgtttgtgctgtgggaccagcagcacaagttccctgtcttcatgggcagggtg |
| | tatgatcccagggcttga |
| 237 | aaccccaatgctactagcagcagcagccaggatcctgagagcctgcaggacagaggggaagggaaggtggccaccactgtgatcagcaagatgctgtt |
| | tgtggagcctatcctggaggtgagctctctgcccaccactaacagcaccaccaattctgctactaagatcactgccaacaccactgatgagcccaccaccc |
| | agcctaccactgagccaactacccagcccaccatccagcccacccagcccaccactcagctgcctactgattctcctactcagcctaccactgggagcttc |
| | tgccctgggcctgtgaccctgtgctctgacctggagtctcattctactgaggctgtgctgggggatgccctggtggacttcagcctgaagctgtaccatgcttt |
| | ctctgccatgaagaaggtggagactaacatggccttctctcctttctctattgccagcctgctgactcaggtgctgctgggggctggggagaataccaagac |
| | taacctggagagcatcctgtcttatcctaaggacttcacttgtgtgcatcaggccctgaagggcttcaccaccaagggggtgacttctgtgagccagattttcc |
| | acagccctgacctggccatcagagacacctttgtgaatgccagcaggaccctgtattctagctctcccagggtgctgagcaacaactctgatgccaatctgg |
| | aactgatcaacacttgggtggccaagaacaccaacaacaagatcagcaggctgctggatagcctgccctctgacaccaggctggtgctgctgaatgccat |
| | ctacctgtctgccaagtggaagaccacctttgaccccaagaagactaggatggagcccttccacttcaagaactctgtgatcaaggtgcccatgatgaatag |
| | caagaagtaccctgtggcccacttcattgaccagaccctgaaggccaaggtggggcagctgcagctgagccacaacctgagcctggtgatcctggtgcc |
| | ccagaacctgaagcacagactggaggacatggagcaggccctgagcccatctgtgttcaaggctattatggagaagctggagatgtctaagtttcagccta |
| | ccctgctgaccctgcccaggatcaaggtgactaccagccaggacatgctgagcatcatggagaagctggaattctttgacttcagctatgatctgaatctgt |
| | gtggcctgactgaagaccctgatttgcaggtgtctgctatgcagcaccagactgtgctggaactgactgagactggggtggaggctgctgctgcctctgcc |
| | atctctgtggccaggaccctgctggtgtttgaggtgcagcagcctttcctgtttgtgctgtgggatcagcagcacaagttccctgtgttcatgggcagggtgta |
| | tgaccctagggcttga |
| 238 | aaccccaatgctacttctagctcctctcaggaccctgagagcctgcaggacaggggggagggcaaggtggccaccactgtgatctctaagatgctgtttgt |
| | ggagcccatcctggaggtgagcagcctgcccaccaccaacagcaccaccaactctgccactaagatcactgccaacaccactgatgagcccaccaccc |
| | agcccactactgagcccaccacccagcctactatccagcccacccagcccactacccagctgcccactgacagccctacccagcccaccactggcagct |
| | tctgccctgggcctgtgaccctgtgctctgacctggagagccattctactgaggctgtgctgggggatgccctggtggacttctctctgaagctgtaccatgc |
| | tttctctgccatgaagaaggtggagactaacatggcttttagccccttcagcattgctagcctgctgacccaggtgctgctgggggctggggagaacactaa |
| | gaccaacctggaatctatcctgagctaccccaaggacttcacctgtgtgcaccaggccctgaagggcttcaccaccaagggggtgacctctgtgagccag |
| | atcttccacagccctgacctggccatcagggatacttttgtgaatgccagcagaaccctgtactcttctagccccagggtgctgagcaataattctgatgctaa |
| | cctggagctgatcaatacctgggtggctaagaataccaacaacaagattagcaggctgctggactctctgccttctgataccaggctggtgctgctgaatgc |
| | catttacctgtctgccaagtggaagaccacttttgaccctaagaagactaggatggagcctttccacttcaagaactctgtcattaaggtgcccatgatgaaca |
| | gcaagaagtatcctgtggcccactttattgaccagactctgaaggccaaggtgggccagctgcagctgagccataacctgagcctggtgatcctggtgccc |
| | cagaacctgaagcataggctggaggacatggagcaggctctgagcccctctgtgttcaaggctattatggagaagctggagatgagcaagttccagccca |
| | ctctgctgaccctgcccagaatcaaggtgaccacctctcaggacatgctgagcatcatggaaaagctggagttctttgacttttcttatgacctgaatctgtgtg |
| | gcctgactgaggatcctgatctgcaggtgtctgccatgcagcaccagactgtgctggagctgactgagactggggtggaggctgctgctgcttctgccatc |
| | tctgtggccaggaccctgctggtgtttgaggtgcagcagcccttcctgtttgtgctgtgggaccagcagcacaagtttcctgtgttcatgggcagggtgtatg |
| | accccagagcctga |
| 239 | aatcccaatgccacctctagctctagccaggatcctgagagcctgcaggacaggggggagggcaaggtggccaccactgtgatcagcaagatgctgttt |
| | gtggagcccattctggaggtgtcttctctgcccaccaccaatagcaccactaattctgccaccaagatcactgctaacaccactgatgagcccaccactcag |
| | cctaccactgagcccaccacccagcccactatccagcccacccagcccaccacccagctgcctactgacagccctacccagcccactactgggagcttc |
| | tgccctggccctgtgaccctgtgctctgacctggagagccacagcactgaggctgtgctgggggatgccctggtggacttcagcctgaagctgtaccatg |
| | ccttttctgccatgaagaaggtggagaccaacatggcctttagccctttcagcattgccagcctgctgactcaggtgctgctgggggctggggagaacacc |
| | aagaccaacctggagagcatcctgagctaccccaaggacttcacttgtgtgcaccaggccctgaagggcttcactaccaagggggtgacttctgtgagcc |
| | agatcttccacagccctgacctggccatcagggatacttttgtgaatgccagcaggaccctgtacagcagcagccccagggtgctgagcaacaactctgat |
| | gctaacctggagctgatcaatacttgggtggccaagaacaccaacaacaagatttctaggctgctggactctctgccctctgacactaggctggtgctgctg |
| | aatgccatctacctgtctgccaagtggaagaccacctttgatcccaagaagactaggatggagcccttccacttcaagaactctgtgatcaaggtgcccatg |
| | atgaacagcaagaagtaccctgtggcccatttcattgaccagaccctgaaggccaaggtggggcagctgcagctgagccacaatctgagcctggtgattc |
| | tggtgccccagaatctgaagcacagactggaggacatggagcaggctctgtctccctctgtgttcaaggccatcatggagaagctggagatgagcaagtt |
| | ccagcccactctgctgactctgcctaggatcaaggtgaccaccagccaggacatgctgagcattatggagaagctggagttctttgacttcagctatgacct |
| | gaacctgtgtggcctgactgaggaccctgatctgcaggtgtctgccatgcagcaccagactgtgctggagctgactgagactggggtggaggctgctgct |
| | gcctctgctatttctgtggccaggaccctgctggtgtttgaggtgcagcagcccttcctgtttgtgctgtgggaccagcagcacaagtttcctgtgttcatggg |
| | gagggtgtatgaccccagggcctga |
| 240 | aatccaaatgctaccagctcctcctcccaggatcctgaatcccttcaagacaggggggagggcaaggtggcaactactgtgatttccaagatgctgtttgtg |
| | gagcccatcctggaggttagcagccttcctactaccaactcaacaaccaattcagccaccaaaattacagctaataccacagatgagccaacaactcaacc |
| | caccactgagcccaccactcagccaaccatccaacccacccaaccaactacccagctcccaacagattctcctacccagcctaccactggctccttctgcc |
| | caggacctgttactctctgctctgacttggaaagccattctactgaggctgtcctgggggatgctttggtagacttctccctgaagctctaccatgcattttcagc |
| | aatgaagaaggtggagaccaacatggccttttccccattcagtatagcaagtctcctgactcaggtcctgctgggggcaggggagaatacaaagaccaac |
| | ctggagagcatcctcagttatcccaaggacttcacctgtgtccaccaggccctgaagggcttcacaacaaagggggtgacctcagtctctcagattttccac |
| | agcccagacctggccataagggacacctttgtgaatgcctctaggaccctgtactcaagctcccccagagtcctaagcaacaacagtgatgcaaatttgga |
| | gctcatcaacacctgggtggccaagaacaccaacaacaagatcagcaggctgctagacagtctgccaagtgatacaaggcttgtcctcctcaatgctatct |
| | acctgagtgccaagtggaagacaacatttgatcccaagaaaaccagaatggaaccctttcacttcaaaaactcagttataaaagtgcccatgatgaatagca |
| | agaagtaccctgtggcccatttcattgaccaaactttgaaagccaaggtggggcagctgcagctctcccacaatctgagtctggtaatcctggtaccccaga |
| | acctgaaacataggcttgaagacatggaacaggctctcagcccttctgttttcaaggccataatggagaagctggagatgtccaagttccagcccactctcc |
| | taacactacccaggatcaaagtgacaaccagccaggatatgctctcaatcatggagaaattggaattttttgatttttcttatgaccttaacctgtgtgggctgac |
| | agaggaccctgatcttcaggtttctgcaatgcagcaccagacagtgctggaactgacagagactggggtggaagctgctgcagcaagtgcaatatctgtg |
| | gccagaaccctgctggtctttgaagtgcagcagcccttcctgtttgtgctgtgggaccagcagcacaagttccctgtcttcatggggagggtatatgacccc |
| | agggcctga |
| 241 | aaccccaatgcaaccagcagttcctctcaggatccagagtccctgcaggacaggggggagggcaaggtggccaccactgtgatctccaagatgctgttt |
| | gtggagcccatcctggaggtatccagcctccctaccaccaacagcaccaccaactcagccaccaaaatcactgctaacaccactgatgagcccacaacc |
| | cagccaactactgagccaaccactcagcctaccatccaacccacccagcctactacccagctccccactgactctcctacccagcccaccactggcagctt |
| | ctgcccaggacctgtgaccctctgctctgacttggagtcccattccacagaggcagtgctgggggatgccctggtagacttctccctgaagctctaccatgc |
| | attctctgccatgaagaaggtggagaccaacatggccttctcccccttcagcattgccagcctcctgacccaggtcctgctgggggcaggggagaacaca |
| | aagacaaacctggagtccatcctcagctaccccaaggacttcacctgtgtccaccaggccctgaagggcttcacaaccaagggggtgaccagtgtctcac |
| | agattttccacagcccagacctggccatcagggacacctttgtgaatgccagtaggaccctgtacagctccagtcccagagtcctcagcaacaactctgat |
| | gccaacctggagctgatcaacacctgggtggccaagaacaccaacaacaagatcagcaggctgctagactcactgccctctgacacaaggctggtcctc |
| | ctcaatgcaatctacctgagtgccaagtggaagaccacctttgaccccaagaagaccaggatggagcccttccacttcaagaacagtgtcattaaggtgcc |
| | catgatgaacagcaagaagtaccctgtggcccacttcattgaccagaccttgaaggccaaggtggggcagctgcagctctcccacaacctgtcactggtc |
| | atcctggttccccagaacctgaagcacaggcttgaggacatggagcaggccctcagcccttctgtattcaaggccataatggagaagctggagatgagca |
| | agttccagcccactctgctgaccctacccaggatcaaggtgaccaccagccaggacatgctctcaatcatggagaagttggagttctttgacttcagctatg |
| | acctgaacctgtgtgggctgacagaggaccctgacctgcaggtgtcagccatgcagcaccagacagtgctggaactgacagagactggggtggaagct |
| | gctgcagcaagtgctatttcagtggccaggaccctgctggtctttgaggtccagcagcccttcctgtttgtgctctgggaccagcagcacaagttccctgtctt |
| | catggggagggtctatgaccccagggcctga |
| 242 | aaccccaatgccaccagctccagctctcaggacccagagagcctgcaggacaggggggagggcaaggtggccaccacagtgatcagcaagatgctgt |
| | ttgtggagcccatcctggaggtgagcagcctccccaccaccaacagcaccaccaattctgccaccaagatcacagccaacaccacagatgagcccacaa |
| | cccagcctaccacagagccaaccacacagcccaccatccaacccacccaacctactacccagctgcccacagacagccctacccagcctaccacaggc |
| | agcttctgccctggccctgtgaccctgtgctctgacttggagagccactccacagaggctgtgctgggggatgccctggtggatttcagcctgaagctgtac |
| | catgccttctctgccatgaagaaggtggagaccaacatggccttcagccccttcagcattgccagcctcctgacccaggtcctgctgggggctggggaga |
| | acacaaagaccaacctggagagcatcctgagctaccccaaggacttcacctgtgtgcaccaggccctgaagggcttcaccaccaagggggtgacctctg |
| | tgagccagattttccacagccctgacctggccatcagggacacctttgtgaatgcctccaggaccctgtacagctctagccccagggtgctgagcaacaac |
| | tctgatgccaacttggagctgatcaacacctgggtggccaagaacaccaacaacaagatcagcaggctgctggacagcctgccctctgacaccaggctg |
| | gtgctcctgaatgccatctacctgtctgccaagtggaagaccacctttgaccccaagaagaccagaatggagcccttccacttcaagaactctgtgataaag |
| | gtgcccatgatgaacagcaagaagtaccctgtggcccacttcattgaccagaccctgaaagccaaggtgggccagctgcagctcagccacaacctgagc |
| | ctggtcatcctggtgccccagaacctgaagcacaggctggaggacatggaacaggccctcagcccctctgtgttcaaggccattatggagaagctggag |
| | atgagcaagttccagcccactctgctgacactgcccaggatcaaggtgaccaccagccaggacatgctgagcatcatggagaagttggagttctttgactt |
| | cagctatgacctgaacctgtgtggcctgacagaggaccctgacctccaggtgtctgccatgcagcaccagacagtgctggaactgacagagacaggggt |
| | ggaagctgctgctgcctctgccatctctgtggccagaaccctgctggtgtttgaggtgcagcagcccttcctgtttgtgctgtgggaccagcagcacaagttc |
| | cctgtgttcatgggcagggtgtatgaccccagggcctga |
| 243 | aaccccaatgctacttctagctcctctcaggaccctgagagccttcaggacaggggggagggcaaggtggccaccactgtgatctctaagatgctgtttgt |
| | ggagcccatcctggaggtgagcagcctgcccaccaccaacagcaccaccaactctgccactaagatcactgccaacaccactgatgagcccaccaccc |
| | agcccactactgagcccaccacccagcctactatccagcccacccagcccactacccagctgcccactgacagccctacccagcccaccactggcagct |
| | tctgccctgggcctgtgaccctgtgctctgacctggagagccattctactgaggctgtgctgggggatgccctggtggacttctctctgaagctgtaccatgc |
| | tttctctgccatgaagaaggtggagactaacatggcttttagccccttcagcattgctagcctgctgacccaggtgctgctgggggctggggagaacactaa |
| | gaccaacctggaatctatcctgagctaccccaaggacttcacctgtgtgcaccaggccctgaagggcttcaccaccaagggggtgacctctgtgagccag |
| | atcttccacagccctgacctggccatcagggatacttttgtgaatgccagcagaaccctgtactcttctagccccagggtgctgagcaataattctgatgctaa |
| | cctggagctgatcaatacctgggtggctaagaataccaacaacaagattagcaggctgctggactctctgccttctgataccaggctggtgctgctgaatgc |
| | catttacctgtctgccaagtggaagaccacttttgaccctaagaagactaggatggagcctttccacttcaagaactctgtcattaaggtgcccatgatgaaca |
| | gcaagaagtatcctgtggcccactttattgaccagactctgaaggccaaggtgggccagcttcagctgagccataacctgagcctggtgatcctggtgccc |
| | cagaacctgaagcataggctggaggacatggagcaggctctgagcccctctgtgttcaaggctattatggagaagctggagatgagcaagttccagccca |
| | ctctgctgaccctgcccagaatcaaggtgaccacctctcaggacatgctgagcatcatggaaaagctggagttctttgacttttcttatgacctgaatctgtgtg |
| | gcctgactgaggatcctgatcttcaggtgtctgccatgcagcaccagactgtgctggagctgactgagactggggtggaggctgctgctgcttctgccatct |
| | ctgtggccaggaccctgctggtgtttgaggtgcagcagcccttcctgtttgtgctgtgggaccagcagcacaagtttcctgtgttcatgggcagggtgtatga |
| | ccccagagcctga |
| 244 | aatcccaccatccaacccacccaaccaactacccagctcccaacagattctcctacccagcccactactgggtccttctgcccaggacctgttactctctgct |
| | ctgacttggagagtcattcaacagaggccgtgttgggggatgctttggtagatttctccctgaagctctaccacgccttctcagcaatgaagaaggtggaga |
| | ccaacatggccttttccccattcagcatcgccagcctccttacccaggtcctgctcggggctggggagaacaccaaaacaaacctggagagcatcctctctt |
| | accccaaggacttcacctgtgtccaccaggccctgaagggcttcacgaccaaaggtgtcacctcagtctctcagattttccacagcccagacctggccata |
| | agggacacctttgtgaatgcctctcggaccctgtacagcagcagccccagagtcctaagcaacaacagtgacgccaacttggagctcatcaacacctggg |
| | tggccaagaacaccaacaacaagatcagccggctgctagacagtctgccctccgatacccgccttgtcctcctcaatgctatctacctgagtgccaagtgg |
| | aagacaacatttgatcccaagaaaaccagaatggaaccctttcacttcaaaaactcagttataaaagtgcccatgatgaatagcaagaagtaccctgtggcc |
| | catttcattgaccaaactttgaaagccaaggtggggcagctgcagctctcccacaatctgagtttggtgatcctggtaccccagaacctgaaacatcgtcttg |
| | aagacatggaacaggctctcagcccttctgttttcaaggccatcatggagaaactggagatgtccaagttccagcccactctcctaacactaccccgcatca |
| | aagtgacgaccagccaggatatgctctcaatcatggagaaattggaattcttcgatttttcttatgaccttaacctgtgtgggctgacagaggaccctgatcttc |
| | aggtttctgcgatgcagcaccagacagtgctggaactgacagagactggggtggaggcggctgcagcctccgccatctctgtggcccgcaccctgctgg |
| | tctttgaagtgcagcagcccttcctcttcgtgctctgggaccagcagcacaagttccctgtcttcatggggcgagtatatgaccccagggcctga |
| 245 | aatgggtccttctgcccaggacctgttactctctgctctgacttggagagtcattcaacagaggccgtgttgggggatgctttggtagatttctccctgaagctc |
| | taccacgccttctcagcaatgaagaaggtggagaccaacatggccttttccccattcagcatcgccagcctccttacccaggtcctgctcggggctgggga |
| | gaacaccaaaacaaacctggagagcatcctctcttaccccaaggacttcacctgtgtccaccaggccctgaagggcttcacgaccaaaggtgtcacctca |
| | gtctctcagattttccacagcccagacctggccataagggacacctttgtgaatgcctctcggaccctgtacagcagcagccccagagtcctaagcaacaa |
| | cagtgacgccaacttggagctcatcaacacctgggtggccaagaacaccaacaacaagatcagccggctgctagacagtctgccctccgatacccgcctt |
| | gtcctcctcaatgctatctacctgagtgccaagtggaagacaacatttgatcccaagaaaaccagaatggaaccctttcacttcaaaaactcagttataaaagt |
| | gcccatgatgaatagcaagaagtaccctgtggcccatttcattgaccaaactttgaaagccaaggtggggcagctgcagctctcccacaatctgagtttggt |
| | gatcctggtaccccagaacctgaaacatcgtcttgaagacatggaacaggctctcagcccttctgttttcaaggccatcatggagaaactggagatgtccaa |
| | gttccagcccactctcctaacactaccccgcatcaaagtgacgaccagccaggatatgctctcaatcatggagaaattggaattcttcgatttttcttatgacct |
| | taacctgtgtgggctgacagaggaccctgatcttcaggtttctgcgatgcagcaccagacagtgctggaactgacagagactggggtggaggcggctgc |
| | agcctccgccatctctgtggcccgcaccctgctggtctttgaagtgcagcagcccttcctcttcgtgctctgggaccagcagcacaagttccctgtcttcatg |
| | gggcgagtatatgaccccagggcctga |
| 246 | aaccccaatgctacttctagctcctctcaggaccctgagagcctgcaggacaggggggagggcaaggtggccaccactgtgatctctaagatgctgtttgt |
| | ggagcccatcctggaggtgagcagcctgcccaccaccaacagcaccaccaactctgccactaagatcactgccaacaccactgatgagcccaccaccc |
| | agcccactactgagcccaccacccagcctactatccagcccacccagcccactacccagctgcccactgacagccctacccagcccaccactggcagct |
| | tctgccctgggcctgtgaccctgtgctctgacctggagagccattctactgaggctgtgctgggggatgccctggtggacttctctctgaagctgtaccatgc |
| | tttctctgccatgaagaaggtggagactaacatggcttttagccccttcagcattgctagcctgctgacccaggtgctgctgggggctggggagaacactaa |
| | gaccaacctggaatctatcctgagctaccccaaggacttcacctgtgtgcaccaggccctgaagggcttcaccaccaagggggtgacctctgtgagccag |
| | atcttccacagccctgacctggccatcagggatacttttgtgaatgccagcagaaccctgtactcttctagccccagggtgctgagcaataattctgatgctaa |
| | cctggagctgatcaatacctgggtggctaagaataccaacaacaagattagcaggctgctggactctctgccttctgataccaggctggtgctgctgaatgc |
| | catttacctgtctgccaagtggaagaccacttttgaccctaagaagactaggatggagcctttccacttcaagaactctgtcattaaggtgcccatgatgaaca |
| | gcaagaagtatcctgtggcccactttattgaccagactctgaaggccaaggtgggccagctgcagctgagccataacctgagcctggtgatcctggtgccc |
| | cagaacctgaagcataggctggaggacatggagcaggctctgagcccctctgtgttcaaggctattatggagaagctggagatgagcaagttccagccca |
| | ctctgctgaccctgcccagaatcaaggtgaccacctctcaggacatgctgagcatcatggaaaagctggagttctttgacttttcttatgacctgaatctgtgtg |
| | gcctgactgaggatcctgatctgcaggtgtctgccatgcagcaccagactgtgctggagctgactgagactggggtggaggctgctgctgcttctgccatc |
| | tctgtggccaggaccctgctggtgtttgaggtgcagcagcccttcctgtttgtgctgtgggaccagcagcacaagtttcctgtgttcatgggcagggtgtatg |
| | accccagagcctga |
| 247 | aaccccaatgctacttctagctcctctcaggaccctgagagcctgcaggacaggggggagggcaaggtggccaccactgtgatctctaagatgctgtttgt |
| | ggagcccatcctggaggtgagcagcctgcccaccaccaacagcaccaccaactctgccactaagatcactgccaacaccactgatgagcccaccaccc |
| | agcccactactgagcccaccacccagcctactatccagcccacccagcccactacccagctgcccactgacagccctacccagcccaccactggcagct |
| | tctgccctgggcctgtgaccctgtgctctgacctggagagccattctactgaggctgtgctgggggatgccctggtggacttctctctgaagctgtaccatgc |
| | tttctctgccatgaagaaggtggagactaacatggcttttagccccttcagcattgctagcctgctgacccaggtgctgctgggggctggggagaacactaa |
| | gaccaacctggaatctatcctgagctaccccaaggacttcacctgtgtgcaccaggccctgaagggcttcaccaccaagggggtgacctctgtgagccag |
| | atcttccacagccctgacctggccatcagggatacttttgtgaatgccagcagaaccctgtactcttctagccccagggtgctgagcaataattctgatgctaa |
| | cctggagctgatcaatacctgggtggctaagaataccaacaacaagattagcaggctgctggactctctgccttctgataccaggctggtgctgctgaatgc |
| | catttacctgtctgccaagtggaagaccacttttgaccctaagaagactaggatggagcctttccacttcaagaactctgtcattaaggtgcccatgatgaaca |
| | gcaagaagtatcctgtggcccactttattgaccagactctgaaggccaaggtgggccagctgcagctgagccataacctgagcctggtgatcctggtgccc |
| | cagaacctgaagcataggctggaggacatggagcaggctctgagcccctctgtgttcaaggctattatggagaagctggagatgagcaagttccagccca |
| | ctctgctgaccctgcccagaatcaaggtgaccacctctcaggacatgctgagcatcatggaaaagctggagttctttgacttttcttatgacctgaatctgtgtg |
| | gcctgactgaggatcctgatctgcaggtgtctgccatgcagcaccagactgtgctggagctgactgagactggggggaggctgctgctgcttctgccatc |
| | tctgtggccaggaccctgctggtgtttgaggtgcagcagcccttcctgtttgtgctgtgggaccagcagcacaagtttcctgtgttcatgggcagggtgtatg |
| | accccagagcctga |
| 248 | aaccccaatgctacttctagctcctctcaggaccctgagagcctgcaggacaggggggagggcaaggtggccaccactgtgatctctaagatgctgtttgt |
| | ggagcccatcctggaggtgagcagcctgcccaccaccaacagcaccaccaactctgccactaagatcactgccaacaccactgatgagcccaccaccc |
| | agcccactactgagcccaccacccagcctactatccagcccacccagcccactacccagctgcccactgacagccctacccagcccaccactggcagct |
| | tctgccctgggcctgtgaccctgtgctctgacctggagagccattctactgaggctgtgctgggggatgccctggtggacttctctctgaagctgtaccatgc |
| | tttctctgccatgaagaaggtggagactaacatggcttttagccccttcagcattgctagcctgctgacccaggtgctgctgggtaagaccctgcttgaattct |
| | ctccaggtcatttgttggacactcccataagagtcaccaatccagacacttacaaagccatgcctctgggaagaagctgtaaaaatgggctattatatattgg |
| | gggtggggtagagggatgtatcttttcattcttgaacattccatcatttcacagtgatgtaataggcacgattgcttgtaaaactctgtgactatacaagaacata |
| | taaaataaggtcgcagccactaaccatgtttcatggcaaggagaggtgataagaaagatgaaattaggcgcagtggctcacgcctgtaatcccagcacttt |
| | gggaggccaaggcgggtggatcacctgaggtcaggagttcaagaccagcctggccaacatggtgaaaccctgtctctactaaaaatacaaaaattatcag |
| | ggagtggtggtgcatgcctgtaatcccagctacttgggcagctgaggcaggagaatcgcttgaacccaggaggtggaggttgcagtgagccgagaccg |
| | caccattgcactacagtctgggtgacagagcgagactctgtctcaaaaaaaaaaaaaaattatcagagatagacctagagtagatgtggttagtactgccttc |
| | tagctctgtgaccttgggcagatcactttaacctctctgagccttgagtcctcttgtgtaaaatagtgatgatgctatctacctcaaaagattaagaagcagaaa |
| | gccaggccggatgcggtggttcacacctgtaatcccagcattttaggaggccgaggcgggcagatcacgaggtcaggagttcgagaccagcctgactaa |
| | catggtgaaaccccgtctctactaaaaataaaaagaaattagctaggcatggtggtgcacacctgtaaccccagctactcaggaggctgaggcaggagaa |
| | tcacttgaacacgggaggcagaggttgcagtgagccgaaatcatgccactgcactccagcctgggaagactgagcaagactctgtctcaaaaaaaaaaa |
| | agaagcagcctagtgtctgacttagtgggaggtcaaaaaaatgtaaatcctctgccatcttgagggattactgtcaagtcccatttggtaattaccctaggaat |
| | ggcacaaacaaattactacaagcagtggggacagagctattactccccagagagaattctaaaaaggctacagaatctttcttggctgggcacggtgactc |
| | acacctataatcctggcactttgggaggccaaggcaggagttcaagaccagcctggccaacatgttgaaaccccatctctactaaaaatgcaaaaattagc |
| | caggcatagtgatgcatgcttattgtcccagctacttgggaggcagaggtgggaggattgcttgaacctggagattcaagtgagctgagattgcaccactgc |
| | attccagcctgggcaacaaagcaagactctgtctcaaaaaaaaaaaaaaaaaaaaaaaaaagagagattgagagaacacttccagctcagatgatctgtg |
| | atcccctccaaagcagggaataccctccattccagcctggtccccaaccctcattcccaaggaaggcccccgactcatcctgcaagtatctttcatctctgcc |
| | ctttgttgcaggggctggggagaacactaagaccaacctggaatctatcctgagctaccccaaggacttcacctgtgtgcaccaggccctgaagggcttca |
| | ccaccaagggggtgacctctgtgagccagatcttccacagccctgacctggccatcagggatacttttgtgaatgccagcagaaccctgtactcttctagcc |
| | ccagggtgctgagcaataattctgatgctaacctggagctgatcaatacctgggtggctaagaataccaacaacaagattagcaggctgctggactctctgc |
| | cttctgataccaggctggtgctgctgaatgccatttacctgtctgccaagtggaagaccacttttgaccctaagaagactaggatggagcctttccacttcaag |
| | aactctgtcattaaggtgcccatgatgaacagcaagaagtatcctgtggcccactttattgaccagactctgaaggccaaggtgggccagctgcagctgag |
| | ccataacctgagcctggtgatcctggtgccccagaacctgaagcataggctggaggacatggagcaggctctgagcccctctgtgttcaaggctattatgg |
| | agaagctggagatgagcaagttccagcccactctgctgaccctgcccagaatcaaggtgaccacctctcaggacatgctgagcatcatggaaaagctgg |
| | agttctttgacttttcttatgacctgaatctgtgtggcctgactgaggatcctgatctgcaggtgtctgccatgcagcaccagactgtgctggagctgactgaga |
| | ctggggtggaggctgctgctgcttctgccatctctgtggccaggaccctgctggtgtttgaggtgcagcagcccttcctgtttgtgctgtgggaccagcagc |
| | acaagtttcctgtgttcatgggcagggtgtatgaccccagagcctga |
| 249 | aaccccaatgctacttctagctcctctcaggaccctgagagcctgcaggacaggggggagggcaaggtggccaccactgtgatctctaagatgctgtttgt |
| | ggagcccatcctggaggtgagcagcctgcccaccaccaacagcaccaccaactctgccactaagatcactgccaacaccactgatgagcccaccaccc |
| | agcccactactgagcccaccacccagcctactatccagcccacccagcccactacccagctgcccactgacagccctacccagcccaccactggcagct |
| | tctgccctgggcctgtgaccctgtgctctgacctggagagccattctactgaggctgtgctgggggatgccctggtggacttctctctgaagctgtaccatgc |
| | tttctctgccatgaagaaggtggagactaacatggcttttagccccttcagcattgctagcctgctgacccaggtgctgctgggtaagaccctgcttgaattct |
| | ctccaggtcatttgttggacactcccataagagtcaccaatccagacacttacaaagccatgcctctgggaagaagctgtaaaaatgggctattatatattgg |
| | gggtggggtagagggatgtatcttttcattcttgaacattccatcatttcacagtgatgtaataggcaccattgcttgtaaaactctgtgactatacaagaacatat |
| | aaaataaggtcccagccactaaccatgtttcatggcaaggagaggtgataagaaagatgaaattattatcagaagaagcagaaagccagcagcctagtgt |
| | ctgacttagtgggaggtcaaaaaaatgtaaatcctctgccatcttgagggattactgtcaagtcccatttggtaattaccctaggaatggcacaaacaaattact |
| | acaagcagtggggacagagctattactccccagagagaattctaaaaaggctacagaatctttcttgagagattgagagaacacttccagctcagatgatct |
| | gtgatcccctccaaagcagggaataccctccattccagcctggtccccaaccctcattcccaaggaaggccccccactcatcctgcaagtatctttcatctct |
| | gccctttgttgcaggggctggggagaacactaagaccaacctggaatctatcctgagctaccccaaggacttcacctgtgtgcaccaggccctgaagggc |
| | ttcaccaccaagggggtgacctctgtgagccagatcttccacagccctgacctggccatcagggatacttttgtgaatgccagcagaaccctgtactcttcta |
| | gccccagggtgctgagcaataattctgatgctaacctggagctgatcaatacctgggtggctaagaataccaacaacaagattagcaggctgctggactct |
| | ctgccttctgataccaggctggtgctgctgaatgccatttacctgtctgccaagtggaagaccacttttgaccctaagaagactaggatggagcctttccactt |
| | caagaactctgtcattaaggtgcccatgatgaacagcaagaagtatcctgtggcccactttattgaccagactctgaaggccaaggtgggccagctgcagc |
| | tgagccataacctgagcctggtgatcctggtgccccagaacctgaagcataggctggaggacatggagcaggctctgagcccctctgtgttcaaggctatt |
| | atggagaagctggagatgagcaagttccagcccactctgctgaccctgcccagaatcaaggtgaccacctctcaggacatgctgagcatcatggaaaag |
| | ctggagttctttgacttttcttatgacctgaatctgtgtggcctgactgaggatcctgatctgcaggtgtctgccatgcagcaccagactgtgctggagctgact |
| | gagactggggtggaggctgctgctgcttctgccatctctgtggccaggaccctgctggtgtttgaggtgcagcagcccttcctgtttgtgctgtgggaccag |
| | cagcacaagtttcctgtgttcatgggcagggtgtatgaccccagagcctga |
| 250 | aatccaaatgctaccagctccagctcccaggatccagagagtttgcaagacagaggcgaagggaaggtcgcaacaacagttatctccaagatgctattcg |
| | ttgaacccatcctggaggtttccagcttgccgacaaccaactcaacaaccaattcagccaccaaaataacagctaataccactgatgaacccaccacacaa |
| | cccaccacagagcccaccacccaacccaccatccaacccacccaaccaactacccagctcccaacagattctcctacccagcccactactgggtccttct |
| | gcccaggacctgttactctctgctctgacttggagagtcattcaacagaggccgtgttgggggatgctttggtagatttctccctgaagctctaccacgccttct |
| | cagcaatgaagaaggtggagaccaacatggccttttccccattcagcatcgccagcctccttacccaggtcctgctcggggctggggagaacaccaaaac |
| | aaacctggagagcatcctctcttaccccaaggacttcacctgtgtccaccaggccctgaagggcttcacgaccaaaggtgtcacctcagtctctcagattttc |
| | cacagcccagacctggccataagggacacctttgtgaatgcctctcggaccctgtacagcagcagccccagagtcctaagcaacaacagtgacgccaac |
| | ttggagctcatcaacacctgggtggccaagaacaccaacaacaagatcagccggctgctagacagtctgccctccgatacccgccttgtcctcctcaatgc |
| | tatctacctgagtgccaagtggaagacaacatttgatcccaagaaaaccagaatggaaccctttcacttcaaaaactcagttataaaagtgcccatgatgaat |
| | agcaagaagtaccctgtggcccatttcattgaccaaactttgaaagccaaggggggcagctgcagctctcccacaatctgagtttggtgatcctggtaccc |
| | cagaacctgaaacatcgtcttgaagacatggaacaggctctcagcccttctgttttcaaggccatcatggagaaactggagatgtccaagttccagcccact |
| | ctcctaacactaccccgcatcaaagtgacgaccagccaggatatgctctcaatcatggagaaattggaattcttcgatttttcttatgaccttaacctgtgtggg |
| | ctgacagaggaccctgatcttcaggtttctgcgatgcagcaccagacagtgctggaactgacagagactggggggaggcggctgcagcctccgccatc |
| | tctgtggcccgcaccctgctggtctttgaagtgcagcagcccttcctcttcgtgctctgggaccagcagcacaagttccctgtcttcatggggcgagtatatg |
| | accccagggccgacaaaactcacacatgcccaccgtgcccagcacctgaactcctggggggaccgtcagtcttcctcttccccccaaaacccaaggaca |
| | ccctcatgatctcccggacccctgaggtcacatgcgtggtggtggacgtgagccacgaagaccctgaggtcaagttcaactggtacgtggacggcgtgg |
| | aggtgcataatgccaagacaaagccgcgggaggagcagtacaacagcacgtaccgtgtggtcagcgtcctcaccgtcctgcaccaggactggctgaat |
| | ggcaaggagtacaagtgcaaggtctccaacaaagccctcccagcccccatcgagaaaaccatctccaaagccaaagggcagccccgagaaccacagg |
| | tgtacaccctgcccccatcccgggatgagctgaccaagaaccaggtcagcctgacctgcctggtcaaaggcttctatcccagcgacatcgccgtggagtg |
| | ggagagcaatgggcagccggagaacaactacaagaccacgcctcccgtgctggactccgacggctccttcttcctctacagcaagctcaccgtggacaa |
| | gagcaggtggcagcaggggaacgtcttctcatgctccgtgatgcatgaggctctgcacaaccactacacgcagaagagcctctccctgtctccgggt |
| 251 | aatccaaatgctaccagctccagctcccaggatccagagagtttgcaagacagaggcgaagggaaggtcgcaacaacagttatctccaagatgctattcg |
| | ttgaacccatcctggaggtttccagcttgccgacaaccaactcaacaaccaattcagccaccaaaataacagctaataccactgatgaacccaccacacaa |
| | cccaccacagagcccaccacccaacccaccatccaacccacccaaccaactacccagctcccaacagattctcctacccagcccactactgggtccttct |
| | gcccaggacctgttactctctgctctgacttggagagtcattcaacagaggccgtgttgggggatgctttggtagatttctccctgaagctctaccacgccttct |
| | cagcaatgaagaaggtggagaccaacatggccttttccccattcagcatcgccagcctccttacccaggtcctgctcggggctggggagaacaccaaaac |
| | aaacctggagagcatcctctcttaccccaaggacttcacctgtgtccaccaggccctgaagggcttcacgaccaaaggtgtcacctcagtctctcagattttc |
| | cacagcccagacctggccataagggacacctttgtgaatgcctctcggaccctgtacagcagcagccccagagtcctaagcaacaacagtgacgccaac |
| | ttggagctcatcaacacctgggtggccaagaacaccaacaacaagatcagccggctgctagacagtctgccctccgatacccgccttgtcctcctcaatgc |
| | tatctacctgagtgccaagtggaagacaacatttgatcccaagaaaaccagaatggaaccctttcacttcaaaaactcagttataaaagtgcccatgatgaat |
| | agcaagaagtaccctgtggcccatttcattgaccaaactttgaaagccaaggtggggcagctgcagctctcccacaatctgagtttggtgatcctggtaccc |
| | cagaacctgaaacatcgtcttgaagacatggaacaggctctcagcccttctgttttcaaggccatcatggagaaactggagatgtccaagttccagcccact |
| | ctcctaacactaccccgcatcaaagtgacgaccagccaggatatgctctcaatcatggagaaattggaattcttcgatttttcttatgaccttaacctgtgtggg |
| | ctgacagaggaccctgatcttcaggtttctgcgatgcagcaccagacagtgctggaactgacagagactggggggaggcggctgcagcctccgccatc |
| | tctgtggcccgcaccctgctggtctttgaagtgcagcagcccttcctcttcgtgctctgggaccagcagcacaagttccctgtcttcatggggcgagtatatg |
| | accccagggccgacaaaactcacacatgcccaccgtgcccagcacctgaactcctggggggaccgtcagtcttcctcttccccccaaaacccaaggaca |
| | ccctcatgatctcccggacccctgaggtcacatgcgtggtggtggacgtgagccacgaagaccctgaggtcaagttcaactggtacgtggacggcgtgg |
| | aggtgcataatgccaagacaaagccgcgggaggagcagtacaacagcacgtaccgtgtggtcagcgtcctcaccgtcctgcaccaggactggctgaat |
| | ggcaaggagtacaagtgcaaggtctccaacaaagccctcccagcccccatcgagaaaaccatctccaaagccaaagggcagccccgagaaccacagg |
| | tgtacaccctgcccccatcccgggatgagctgaccaagaaccaggtcaatctgacctgcctggtcaaaggcttctatcccagcgacatcgccgtggagtg |
| | ggagagcaatgggcagccggagaacaactacaagaccacgcctcccgtgctggactccgacggctccttcttcctcaatagcaagctcaccgtggacaa |
| | gagcaggtggcagcaggggaacgtcttctcatgctccgtgatgcatgaggctctgcacaaccactacacgcagaagagcctctccctgtctccgggt |
| 252 | aatccaaatgctaccagctccagctcccaggatccagagagtttgcaagacagaggcgaagggaaggtcgcaacaacagttatctccaagatgctattcg |
| | ttgaacccatcctggaggtttccagcttgccgacaaccaactcaacaaccaattcagccaccaaaataacagctaataccactgatgaacccaccacacaa |
| | cccaccacagagcccaccacccaacccaccatccaacccacccaaccaactacccagctcccaacagattctcctacccagcccactactgggtccttct |
| | gcccaggacctgttactctctgctctgacttggagagtcattcaacagaggccgtgttgggggatgctttggtagatttctccctgaagctctaccacgccttct |
| | cagcaatgaagaaggtggagaccaacatggccttttccccattcagcatcgccagcctccttacccaggtcctgctcggggctggggagaacaccaaaac |
| | aaacctggagagcatcctctcttaccccaaggacttcacctgtgtccaccaggccctgaagggcttcacgaccaaaggtgtcacctcagtctctcagattttc |
| | cacagcccagacctggccataagggacacctttgtgaatgcctctcggaccctgtacagcagcagccccagagtcctaagcaacaacagtgacgccaac |
| | ttggagctcatcaacacctgggtggccaagaacaccaacaacaagatcagccggctgctagacagtctgccctccgatacccgccttgtcctcctcaatgc |
| | tatctacctgagtgccaagtggaagacaacatttgatcccaagaaaaccagaatggaaccctttcacttcaaaaactcagttataaaagtgcccatgatgaat |
| | agcaagaagtaccctgtggcccatttcattgaccaaactttgaaagccaaggtggggcagctgcagctctcccacaatctgagtttggtgatcctggtaccc |
| | cagaacctgaaacatcgtcttgaagacatggaacaggctctcagcccttctgttttcaaggccatcatggagaaactggagatgtccaagttccagcccact |
| | ctcctaacactaccccgcatcaaagtgacgaccagccaggatatgctctcaatcatggagaaattggaattcttcgatttttcttatgaccttaacctgtgtggg |
| | ctgacagaggaccctgatcttcaggtttctgcgatgcagcaccagacagtgctggaactgacagagactggggggaggcggctgcagcctccgccatc |
| | tctgtggcccgcaccctgctggtctttgaagtgcagcagcccttcctcttcgtgctctgggaccagcagcacaagttccctgtcttcatggggcgagtatatg |
| | accccagggccgacaaaactcacacatgcccaccgtgcccagcacctgaactcctggggggaccgtcagtcttcctcttccccccaaaacccaaggaca |
| | ccctcatgatctcccggacccctgaggtcacatgcgtggtggtggacgtgagccacgaagaccctgaggtcaagttcaactggtacgtggacggcgtgg |
| | aggtgcataatgccaagacaaagccgcgggaggagcagtacaacagcacgtaccgtgtggtcagcgtcctcaccgtcctgcaccaggactggctgaat |
| | ggcaaggagtacaagtgcaaggtctccaacaaagccctcccagcccccatcgagaaaaccatctccaaagccaaagggcagccccgagaaccacagg |
| | tgtacaccaagcccccatcccgggatgagctgaccaagaaccaggtcagcctgagctgcctggtcaaaggcttctatcccagcgacatcgccgtggagt |
| | gggagagcaatgggcagccggagaacaactacaagaccacggtgcccgtgctggactccgacggctccttcagactcgccagctacctcaccgtggac |
| | aagagcaggtggcagcaggggaacgtcttctcatgctccgtgatgcatgaggctctgcacaaccactacacgcagaagagcctctccctgtctccgggt |
| 253 | aatccaaatgctaccagctccagctcccaggatccagagagtttgcaagacagaggcgaagggaaggtcgcaacaacagttatctccaagatgctattcg |
| | ttgaacccatcctggaggtttccagcttgccgacaaccaactcaacaaccaattcagccaccaaaataacagctaataccactgatgaacccaccacacaa |
| | cccaccacagagcccaccacccaacccaccatccaacccacccaaccaactacccagctcccaacagattctcctacccagcccactactgggtccttct |
| | gcccaggacctgttactctctgctctgacttggagagtcattcaacagaggccgtgttgggggatgctttggtagatttctccctgaagctctaccacgccttct |
| | cagcaatgaagaaggtggagaccaacatggccttttccccattcagcatcgccagcctccttacccaggtcctgctcggggctggggagaacaccaaaac |
| | aaacctggagagcatcctctcttaccccaaggacttcacctgtgtccaccaggccctgaagggcttcacgaccaaaggtgtcacctcagtctctcagattttc |
| | cacagcccagacctggccataagggacacctttgtgaatgcctctcggaccctgtacagcagcagccccagagtcctaagcaacaacagtgacgccaac |
| | ttggagctcatcaacacctgggtggccaagaacaccaacaacaagatcagccggctgctagacagtctgccctccgatacccgccttgtcctcctcaatgc |
| | tatctacctgagtgccaagtggaagacaacatttgatcccaagaaaaccagaatggaaccctttcacttcaaaaactcagttataaaagtgcccatgatgaat |
| | agcaagaagtaccctgtggcccatttcattgaccaaactttgaaagccaaggtggggcagctgcagctctcccacaatctgagtttggtgatcctggtaccc |
| | cagaacctgaaacatcgtcttgaagacatggaacaggctctcagcccttctgttttcaaggccatcatggagaaactggagatgtccaagttccagcccact |
| | ctcctaacactaccccgcatcaaagtgacgaccagccaggatatgctctcaatcatggagaaattggaattcttcgatttttcttatgaccttaacctgtgtggg |
| | ctgacagaggaccctgatcttcaggtttctgcgatgcagcaccagacagtgctggaactgacagagactggggggaggcggctgcagcctccgccatc |
| | tctgtggcccgcaccctgctggtctttgaagtgcagcagcccttcctcttcgtgctctgggaccagcagcacaagttccctgtcttcatggggcgagtatatg |
| | accccagggccgacaaaactcacacatgcccaccgtgcccagcacctgaactcctggggggaccgtcagtcttcctcttccccccaaaacccaaggaca |
| | ccctctacatcacccgggagcctgaggtcacatgcgtggtggtggacgtgagccacgaagaccctgaggtcaagttcaactggtacgtggacggcgtgg |
| | aggtgcataatgccaagacaaagccgcgggaggagcagtacaacagcacgtaccgtgtggtcagcgtcctcaccgtcctgcaccaggactggctgaat |
| | ggcaaggagtacaagtgcaaggtctccaacaaagccctcccagcccccatcgagaaaaccatctccaaagccaaagggcagccccgagaaccacagg |
| | tgtacaccctgcccccatcccgggatgagctgaccaagaaccaggtcagcctgacctgcctggtcaaaggcttctatcccagcgacatcgccgtggagtg |
| | ggagagcaatgggcagccggagaacaactacaagaccacgcctcccgtgctggactccgacggctccttcttcctctacagcaagctcaccgtggacaa |
| | gagcaggtggcagcaggggaacgtcttctcatgctccgtgatgcatgaggctctgcacaaccactacacgcagaagagcctctccctgtctccgggt |
| 254 | aatccaaatgctaccagctccagctcccaggatccagagagtttgcaagacagaggcgaagggaaggtcgcaacaacagttatctccaagatgctattcg |
| | ttgaacccatcctggaggtttccagcttgccgacaaccaactcaacaaccaattcagccaccaaaataacagctaataccactgatgaacccaccacacaa |
| | cccaccacagagcccaccacccaacccaccatccaacccacccaaccaactacccagctcccaacagattctcctacccagcccactactgggtccttct |
| | gcccaggacctgttactctctgctctgacttggagagtcattcaacagaggccgtgttgggggatgctttggtagatttctccctgaagctctaccacgccttct |
| | cagcaatgaagaaggtggagaccaacatggccttttccccattcagcatcgccagcctccttacccaggtcctgctcggggctggggagaacaccaaaac |
| | aaacctggagagcatcctctcttaccccaaggacttcacctgtgtccaccaggccctgaagggcttcacgaccaaaggtgtcacctcagtctctcagattttc |
| | cacagcccagacctggccataagggacacctttgtgaatgcctctcggaccctgtacagcagcagccccagagtcctaagcaacaacagtgacgccaac |
| | ttggagctcatcaacacctgggtggccaagaacaccaacaacaagatcagccggctgctagacagtctgccctccgatacccgccttgtcctcctcaatgc |
| | tatctacctgagtgccaagtggaagacaacatttgatcccaagaaaaccagaatggaaccctttcacttcaaaaactcagttataaaagtgcccatgatgaat |
| | agcaagaagtaccctgtggcccatttcattgaccaaactttgaaagccaaggtggggcagctgcagctctcccacaatctgagtttggtgatcctggtaccc |
| | cagaacctgaaacatcgtcttgaagacatggaacaggctctcagcccttctgttttcaaggccatcatggagaaactggagatgtccaagttccagcccact |
| | ctcctaacactaccccgcatcaaagtgacgaccagccaggatatgctctcaatcatggagaaattggaattcttcgatttttcttatgaccttaacctgtgtggg |
| | ctgacagaggaccctgatcttcaggtttctgcgatgcagcaccagacagtgctggaactgacagagactggggggaggcggctgcagcctccgccatc |
| | tctgtggcccgcaccctgctggtctttgaagtgcagcagcccttcctcttcgtgctctgggaccagcagcacaagttccctgtcttcatggggcgagtatatg |
| | accccagggccgacaaaactcacacatgcccaccgtgcccagcacctgaactcctggggggaccgtcagtcttcctcttccccccaaaacccaaggaca |
| | ccctcatgatctcccggacccctgaggtcacatgcgtggtggtggacgtgagccacgaagaccctgaggtcaagttcaactggtacgtggacggcgtgg |
| | aggtgcataatgccaagacaaagccgcgggaggagcagtacaacagcacgtaccgtgtggtcagcgtcctcaccgtcctgcaccaggactggctgaat |
| | ggcaaggagtacaagtgcaaggtctccaacaaagccctcccagcccccatcgagaaaaccatctccaaagccaaagggcagccccgagaaccacagg |
| | tgtacaccctgcccccatcccgggatgagctgaccaagaaccaggtcagcctgacctgcctggtcaaaggcttctatcccagcgacatcgccgtggagtg |
| | ggagagcaatgggcagccggagaacaactacaagaccacgcctcccgtgctggactccgacggctccttcttcctctacagcaagctcaccgtggacaa |
| | gagcaggtggcagcaggggaacgtcttctcatgctccgtgctgcatgaggctctgcacagccactacacgcagaagagcctctccctgtctccgggt |
| 255 | aatccaaatgctaccagctccagctcccaggatccagagagtttgcaagacagaggcgaagggaaggtcgcaacaacagttatctccaagatgctattcg |
| | ttgaacccatcctggaggtttccagcttgccgacaaccaactcaacaaccaattcagccaccaaaataacagctaataccactgatgaacccaccacacaa |
| | cccaccacagagcccaccacccaacccaccatccaacccacccaaccaactacccagctcccaacagattctcctacccagcccactactgggtccttct |
| | gcccaggacctgttactctctgctctgacttggagagtcattcaacagaggccgtgttgggggatgctttggtagatttctccctgaagctctaccacgccttct |
| | cagcaatgaagaaggtggagaccaacatggccttttccccattcagcatcgccagcctccttacccaggtcctgctcggggctggggagaacaccaaaac |
| | aaacctggagagcatcctctcttaccccaaggacttcacctgtgtccaccaggccctgaagggcttcacgaccaaaggtgtcacctcagtctctcagattttc |
| | cacagcccagacctggccataagggacacctttgtgaatgcctctcggaccctgtacagcagcagccccagagtcctaagcaacaacagtgacgccaac |
| | ttggagctcatcaacacctgggtggccaagaacaccaacaacaagatcagccggctgctagacagtctgccctccgatacccgccttgtcctcctcaatgc |
| | tatctacctgagtgccaagtggaagacaacatttgatcccaagaaaaccagaatggaaccctttcacttcaaaaactcagttataaaagtgcccatgatgaat |
| | agcaagaagtaccctgtggcccatttcattgaccaaactttgaaagccaaggtggggcagctgcagctctcccacaatctgagtttggtgatcctggtaccc |
| | cagaacctgaaacatcgtcttgaagacatggaacaggctctcagcccttctgttttcaaggccatcatggagaaactggagatgtccaagttccagcccact |
| | ctcctaacactaccccgcatcaaagtgacgaccagccaggatatgctctcaatcatggagaaattggaattcttcgatttttcttatgaccttaacctgtgtggg |
| | ctgacagaggaccctgatcttcaggtttctgcgatgcagcaccagacagtgctggaactgacagagactggggtggaggcggctgcagcctccgccatc |
| | tctgtggcccgcaccctgctggtctttgaagtgcagcagcccttcctcttcgtgctctgggaccagcagcacaagttccctgtcttcatggggcgagtatatg |
| | accccagggccgacaaaactcacacatgcccaccgtgcccagcacctgaactcctggggggaccgtcagtcttcctcttccccccaaaacccaaggaca |
| | ccctcatgatctcccggacccctgagatcacatgcgtggtggtggacgtgagccacgaagaccctgaggtcaagttcaactggtacgtggacggcgtgg |
| | aggtgcataatgccaagacaaagccgcgggaggagcagtacaacagcacgtaccgtgtggtcagcgtcctcaccttcctgcaccaggactggctgaatg |
| | gcaaggagtacaagtgcaaggtctccaacaaagccctcccagcccccatcgagaaaaccatctccaaagccaaagggcagccccgagaaccacaggt |
| | gtacaccctgcccccatcccgggatgagctgaccaagaaccaggtcagcctgacctgcctggtcaaaggcttctatcccagcgacatcgccgtggagtg |
| | ggagagcaatgggcagccggagaacaactacaagaccacgcctcccgtgctggactccgacggctccttcttcctctacagcaagctcaccgtggacaa |
| | gagcaggtggcagcaggggaacgtcttctcatgctccgtgctgcatgaggctctgcacaaccactacacgcagaagagcctctccctgtctccgggt |
| 256 | aaccccaatgctacttctagctcctctcaggaccctgagagcctgcaggacaggggggagggcaaggtggccaccactgtgatctctaagatgctgtttgt |
| | ggagcccatcctggaggtgagcagcctgcccaccaccaacagcaccaccaactctgccactaagatcactgccaacaccactgatgagcccaccaccc |
| | agcccactactgagcccaccacccagcctactatccagcccacccagcccactacccagctgcccactgacagccctacccagcccaccactggcagct |
| | tctgccctgggcctgtgaccctgtgctcagacctggagagccactctactgaggctgtgctgggggatgccctggtggacttctctctgaagctgtatcatg |
| | ctttctctgccatgaagaaggtggagactaacatggcttttagccccttcagcattgctagcctgctgacccaggtgctgctgggggctggggagaacacta |
| | agaccaacctggaatctatcctgagctaccccaaggacttcacctgtgtgcaccaggccctgaagggcttcaccaccaagggggtgacctctgtgagcca |
| | gatcttccacagccctgacctggccatcagggatacttttgtgaatgccagcagaaccctgtactcttctagccccagggtgctgagcaataattctgatgcta |
| | acctggagctgatcaatacctgggtggctaagaataccaacaacaagattagcaggctgctggactctctgccttctgataccaggctggtgctgctgaatg |
| | ccatttacctgtctgccaagtggaagaccacttttgaccctaagaagactaggatggagcctttccacttcaagaactctgtcattaaggtgcccatgatgaac |
| | agcaagaagtatcctgtggcccactttattgaccagactctgaaggccaaggtgggccagctgcagctgagccacaacctgagcctggtgatcctggtgc |
| | cccagaacctgaagcacaggctggaggacatggagcaggctctgagcccctctgtgttcaaggctattatggagaagctggagatgagcaagttccagc |
| | ccactctgctgaccctgcccagaatcaaggtgaccacctctcaggacatgctgagcatcatggaaaagctggagttctttgacttttcttatgacctgaatctg |
| | tgtggcctgactgaggatcctgatctgcaggtgtctgccatgcagcaccagactgtgctggagctgactgagactggggggaggctgctgctgcttctgc |
| | catctctgtggccaggaccctgctggtgtttgaggtgcagcagcccttcctgtttgtgctgtgggaccagcagcacaagtttcctgtgttcatgggcagggtg |
| | tatgaccccagagcctga |
| 257 | aaccccaatgctacttctagctcctctcaggaccctgagagcctgcaggacaggggggagggcaaggtggccaccactgtgatctctaagatgctgtttgt |
| | ggagcccatcctggaggtgagcagcctgcccaccaccaacagcaccaccaactctgccactaagatcactgccaacaccactgatgagcccaccaccc |
| | agcccactactgagcccaccacccagcctactatccagcccacccagcccactacccagctgcccactgacagccctacccagcccaccactggcagct |
| | tctgccctgggcctgtgaccctgtgctctgacctggagagccattctactgaggctgtgctgggggatgccctggtggacttctctctgaagctgtaccatgc |
| | tttctctgccatgaagaaggtggagactaacatggcttttagccccttcagcattgctagcctgctgacccaggtgctgctgggggctggggagaacactaa |
| | gaccaacctggaatctatcctgagctaccccaaggacttcacctgtgtgcaccaggccctgaagggcttcaccaccaagggggtgacctctgtgagccag |
| | atcttccacagccctgacctggccatcagggatacttttgtgaatgccagcagaaccctgtactcttctagccccagggtgctgagcaataattctgatgctaa |
| | cctggagctgatcaatacctgggtggctaagaataccaacaacaagattagcaggctgctggactctctgccttctgataccaggctggtgctgctgaatgc |
| | catttacctgtctgccaagtggaagaccacttttgaccctaagaagactaggatggagcctttccacttcaagaactctgtcattaaggtgcccatgatgaaca |
| | gcaagaagtatcctgtggcccactttattgaccagactctgaaggccaaggtgggccagctgcagctgagccataacctgagcctggtgatcctggtgccc |
| | cagaacctgaagcataggctggaggacatggagcaggctctgagcccctctgtgttcaaggctattatggagaagctggagatgagcaagttccagccca |
| | ctctgctgaccctgcccagaatcaaggtgaccacctctcaggacatgctgagcatcatggaaaagctggagttctttgacttttcttatgacctgaatctgtgtg |
| | gcctgactgaggatcctgatctgcaggtgtctgccatgcagcaccagactgtgctggagctgactgagactggggggaggctgctgctgcttctgccatc |
| | tctgtggccaggaccctgctggtgtttgaggtgcagcagcccttcctgtttgtgctgtgggaccagcagcacaagtttcctgtgttcatgggcagggtgtatg |
| | accccagagcctga |
| 258 | aaccccaatgctacttctagctcctctcaggaccctgagagcctgcaggacaggggggagggcaaggtggccaccactgtgatctctaagatgctgtttgt |
| | ggagcccatcctggaggtgagcagcctgcccaccaccaacagcaccaccaactctgccactaagatcactgccaacaccactgatgagcccaccaccc |
| | agcccactactgagcccaccacccagcctactatccagcccacccagcccactacccagctgcccactgacagccctacccagcccaccactggcagct |
| | tctgccctgggcctgtgaccctgtgctctgacctggagagccattctactgaggctgtgctgggggatgccctggtggacttctctctgaagctgtaccatgc |
| | tttctctgccatgaagaaggtggagactaacatggcttttagccccttcagcattgctagcctgctgacccaggtgctgctgggtaagaccctgcttgaattct |
| | ctccaggtcatttgttggacactcccataagagtcaccaatccagacacttacaaagccatgcctctgggaagaagctgtaaaaatgggctattatatattgg |
| | gggtggggtagagggatgtatcttttcattcttgaacattccatcatttcacagtgatgtaataggcacgattgcttgtaaaactctgtgactatacaagaacata |
| | taaaataaggtcgcagccactaaccatgtttcatggcaaggagaggtgataagaaagatgaaattattatcagaagaagcagaaagccagcagcctagtgt |
| | ctgacttagtgggaggtcaaaaaaatgtaaatcctctgccatcttgagggattactgtcaagtcccatttggtaattaccctaggaatggcacaaacaaattact |
| | acaagcagtggggacagagctattactccccagagagaattctaaaaaggctacagaatctttcttgagagattgagagaacacttccagctcagatgatct |
| | gtgatcccctccaaagcagggaataccctccattccagcctggtccccaaccctcattcccaaggaaggcccccgactcatcctgcaagtatctttcatctct |
| | gccctttgttgcaggggctggggagaacactaagaccaacctggaatctatcctgagctaccccaaggacttcacctgtgtgcaccaggccctgaagggc |
| | ttcaccaccaagggggtgacctctgtgagccagatcttccacagccctgacctggccatcagggatacttttgtgaatgccagcagaaccctgtactcttcta |
| | gccccagggtgctgagcaataattctgatgctaacctggagctgatcaatacctgggtggctaagaataccaacaacaagattagcaggctgctggactct |
| | ctgccttctgataccaggctggtgctgctgaatgccatttacctgtctgccaagtggaagaccacttttgaccctaagaagactaggatggagcctttccactt |
| | caagaactctgtcattaaggtgcccatgatgaacagcaagaagtatcctgtggcccactttattgaccagactctgaaggccaaggtgggccagctgcagc |
| | tgagccataacctgagcctggtgatcctggtgccccagaacctgaagcataggctggaggacatggagcaggctctgagcccctctgtgttcaaggctatt |
| | atggagaagctggagatgagcaagttccagcccactctgctgaccctgcccagaatcaaggtgaccacctctcaggacatgctgagcatcatggaaaag |
| | ctggagttctttgacttttcttatgacctgaatctgtgtggcctgactgaggatcctgatctgcaggtgtctgccatgcagcaccagactgtgctggagctgact |
| | gagactggggtggaggctgctgctgcttctgccatctctgtggccaggaccctgctggtgtttgaggtgcagcagcccttcctgtttgtgctgtgggaccag |
| | cagcacaagtttcctgtgttcatgggcagggtgtatgaccccagagcctga |
| 259 | atggctagcagactgactctgctgaccctgctgctgctgctgctggctggggacagggccagcagc |
| 260 | atggccagcaggctgaccctgctgactctgctgctgctgctgctggctggggacagggccagcagc |
| 261 | atggctagcagactgactctgctgaccctgctgctgctgctgctggctggggacagggccagcagc |
| 262 | atggctagcagactgactctgctgaccctgctgctgctgctgctggctggggacagggccagcagc |
| 263 | atggccagcaggctgaccctgctgaccctgctgctgctcctgctggctggggatagggccagcagc |
| 264 | atggcctctaggctgactctgctgactctgctgctcctgctgctggctggggacagggccagctct |
| 265 | atggctagcaggctgaccctgctgaccctgctgctcctgctgctggctggggacagggcctctagc |
| 266 | atggcctccaggctgaccctgctgaccctcctgctgctcctgctggctggggatagagcctctagc |
| 267 | atggcctccaggctgaccctgctcaccctcctgctgctcctgctggctggggacagggcctccagc |
| 268 | atggcctccaggctgaccctgctgaccctcctgctgctcctgctggctggggacagagccagcagc |
| 269 | aaccccaatgctacttctagctcctctcaggaccctgagagcctgcaggacaggggggagggcaaggtggccaccactgtgatctctaagatgctgtttgt |
| | ggagcccatcctggaggtgagcagcctgcccaccaccaacagcaccaccaactctgccactaagatcactgccaacaccactgatgagcccaccaccc |
| | agcccactactgagcccaccacccagcctactatccagcccacccagcccactacccagctgcccactgacagccctacccagcccaccactggcagct |
| | tctgccctgggcctgtgaccctgtgctctgacctggagagccattctactgaggctgtgctgggggatgccctggtggacttctctctgaagctgtaccatgc |
| | tttctctgccatgaagaaggtggagactaacatggcttttagccccttcagcattgctagcctgctgacccaggtgctgctgggggctggggagaacactaa |
| | gaccaacctggaatctatcctgagctaccccaaggacttcacctgtgtgcaccaggccctgaagggcttcaccaccaagggggtgacctctgtgagccag |
| | atcttccacagccctgacctggccatcagggatacttttgtgaatgccagcagaaccctgtactcttctagccccagggtgctgagcaataattctgatgctaa |
| | cctggagctgatcaatacctgggtggctaagaataccaacaacaagattagcaggctgctggactctctgccttctgataccaggctggtgctgctgaatgc |
| | catttacctgtctgccaagtggaagaccacttttgaccctaagaagactaggatggagcctttccacttcaagaactctgtcattaaggtgcccatgatgaaca |
| | gcaagaagtatcctgtggcccactttattgaccagactctgaaggccaaggtgggccagctgcagctgagccataacctgagcctggtgatcctggtgccc |
| | cagaacctgaagcataggctggaggacatggagcaggctctgagcccctctgtgttcaaggctattatggagaagctggagatgagcaagttccagccca |
| | ctctgctgaccctgcccagaatcaaggtgaccacctctcaggacatgctgagcatcatggaaaagctggagttctttgacttttcttatgacctgaatctgtgtg |
| | gcctgactgaggatcctgatctgcaggtgtctgccatgcagcaccagactgtgctggagctgactgagactggggtggaggctgctgctgcttctgccatc |
| | tctgtggccaggaccctgctggtgtttgaggtgcagcagcccttcctgtttgtgctgtgggaccagcagcacaagtttcctgtgttcatgggcagggtgtatg |
| | accccagagcctga |

[0355] Additional embodiments are directed to the C1-INH encoding sequence provided in any one of SEQ ID NOs: 232-258 and 269. In certain embodiments, the polynucleotide comprises a sequence at least 85%, at least 90%, at least 93%, at least 95%, at least 96%, at least 97%, at least 98%, at least 99% or 100% identical to a C1-INH encoding sequence provided in any one SEQ ID NOs: 232-258 and 269; and independently C1-INH has a sequence identify to SEQ ID NO: 181 of at least 93%, at least 95%, at least 96%, at least 97%, at least 98%, at least 99% or 100%. Reference to independently indicates any of the provided sequence identities to the CT-INH encoding sequence may be combined with any of the provided sequence identities of SEQ ID NO: 181.

[0356] A set of illustrative examples of independently include, a nucleic acid having a sequence identity to SEQ ID NO: 236 or bases 1 to 1500 of SEQ ID NO: 236 of at least 90%, and encoding C1-INH having a sequence identity of at least 93%, at least 95%, at least 96%, at least 97%, at least 98%, at least 99% or 100% to SEQ ID NO: 181; a nucleic acid having a sequence identity to SEQ ID NO: 236 or bases 1 to 1500 of SEQ ID NO: 236 of at least 95%, and encoding C1-INH having a sequence identity of at least 93%, at least 95%, at least 96%, at least 97%, at least 98%, at least 99% or 100% to SEQ ID NO: 181; and a nucleic acid having a sequence identity to SEQ ID NO: 236 of at least 99% or bases 1 to 1500 of SEQ ID NO: 236 and encoding C1-INH having a sequence identity of at least 99% to the sequence of SEQ ID NO: 181.

[0357] Another set of illustrative examples of independently include, a nucleic acid having a sequence identity to SEQ ID NO: 238 or bases 1 to 1500 of SEQ ID NO: 238 of at least 90%, and encoding C1-INH having a sequence identity of at least 93%, at least 95%, at least 96%, at least 97%, at least 98%, at least 99% or 100% to SEQ ID NO: 181; a nucleic acid having a sequence identity to SEQ ID NO: 238 or bases 1 to 1500 of SEQ ID NO: 238 of at least 95%, and encoding C1-INH having a sequence identity of at least 93%, at least 95%, at least 96%, at least 97%, at least 98%, at least 99% or 100% to SEQ ID NO: 181; and a nucleic acid having a sequence identity to SEQ ID NO: 238 or bases 1 to 1500 of SEQ ID NO: 238 of at least 99% and encoding C1-INH having a sequence identity of at least 99% to the sequence of SEQ ID NO: 181.

[0358] Another set of illustrative examples of independently include, a nucleic acid having a sequence identity to SEQ ID NO: 243 or bases 1 to 1540 of SEQ ID NO: 243 of at least 90%, and encoding C1-INH having a sequence identity of at least 93%, at least 95%, at least 96%, at least 97%, at least 98%, at least 99% or 100% to SEQ ID NO: 181; a nucleic acid having a sequence identity to SEQ ID NO: 243 or bases 1 to 1540 of SEQ ID NO: 243 of at least 93%, at least 95%, and encoding C1-INH having a sequence identity of at least 93%, at least 95%, at least 96%, at least 97%, at least 98%, at least 99% or 100% to SEQ ID NO: 181; and a nucleic acid having a sequence identity to SEQ ID NO: 243 or bases 1 to 1540 of SEQ ID NO: 243 of at least 99% and encoding C1-INH having a sequence identity of at least 99% to SEQ ID NO: 181.

[0359] In certain embodiments the encoding C1-INH further comprises a signal peptide encoding sequence at least 95%, at least 97% or 100% identical to the sequence of any one of SEQ ID NOs: 84-103 and 259-268; and independently and encode C1-INH having a sequence identity of at least 93%, at least 95%, at least 96%, at least 97%, at least 98%, at least 99% or 100% to SEQ ID NO: 192.

[0360] The human C1-INH protein is well characterized and sequences from different species including primates are well known in the art. The different sequences illustrate sequence diversity of C1-INH. Examples of different C1-INH proteins are provided in the Tables below. The percent identity in the tables below were determined using BLAST with the default selling and numbers listed are the 00 pairwise identities. In different embodiments, the percent identity provided throughout the application is determined using BLAST with the default selling to obtain % pairwise identities.

| | | % Identity to |
|---|---|---|
| | | Full length human |
| Species | Reference/SEQ ID NO | C1-INH |
| Human | SEQ ID NO: 192 | 100 |
| Rhesus | Protein ID: 703928 | 93 |
| Cynomolgus monkey | Protein ID: XP_005577905.2 | 93 |
| African Green | Protein ID: XP_007996463.1 | 94 |
| Chimpanzee | Protein ID: XP_003318026.1 | 98 |

| | | % Identity to |
|---|---|---|
| | | Mature Human |
| Species | Reference/SEQ ID NO | C1-INH |
| Human | SEQ ID NO: 181 | 100 |
| Rhesus | Protein ID: 703928 | 92 |
| | Mature sequence | |
| Cynomolgus monkey | Protein ID: XP_005577905.2 | 92 |
| | Mature sequence | |
| African Green | Protein ID: XP_007996463.1 | 94 |
| | Mature sequence | |
| Chimpanzee | Protein ID: XP_003318026.1 | 98 |
| | Mature sequence | |

### EXAMPLES

### Example 1—Expression Cassette Overview

[0361] C1 inhibitor expression cassettes were designed as shown in Table 1. See also FIG. 1 for a schematic of a sample expression cassette. The expression cassettes contained 5′ and 3′ flanking AAV inverted terminal repeats (ITRs), a liver-specific ApoE/hAAT enhancer/promoter sequence, a signal peptide, a human C1 inhibitor coding sequence, with or without a P2A linker or an Fc domain, and a bovine growth hormone (bGH) polyadenylation (poly A) sequence. Some of the expression cassettes further contained a human hemoglobin subunit beta (HBB2) intron, an additional enhancer sequence, an miRNA binding site, and/or a RIDD sequence.

TABLE 1
SERPING1 expression cassette components

| | | | | | | Additional | |
|---|---|---|---|---|---|---|---|
| | SEQ | | SEQ | | SEQ | Downstream | SEQ |
| | ID | signal | ID | | ID | Regulatory | ID |
| Expression Cassette | NO | peptide | NO | CDNA | NO | Element | NO |
| pAAV_ApoE_hAAT_HBB2ml_ | 1 | SERPING1 | 84 | SERPING1 | 232 | none | |
| SERPING1_BGH228 | | | | | | | |
| pAAV_ApoE_hAAT_HBB2ml_ | 2 | SP7 | 85 | SERPING1 | 232 | none | |
| SP7.SERPING1_BGH228 | | | | | | | |
| pAAV_ApoE_hAAT_HBB2ml_ | 3 | ALB | 90 | SERPING1 | 232 | none | |
| ALB.SERPING1_BGH228 | | | | | | | |
| pAAV_ApoE_hAAT_HBB2ml_ | 4 | ORMI | 91 | SERPING1 | 232 | none | |
| ORM1.SERPING1_BGH228 | | | | | | | |
| pAAV_ApoE_hAAT_HBB2ml_ | 5 | TF | 92 | SERPING1 | 232 | none | |
| TF.SERPING1_BGH228 | | | | | | | |
| pAAV_ApoE_hAAT_HBB2ml_ | 6 | AMBP | 93 | SERPING1 | 232 | none | |
| AMBP.SERPING1_BGH228 | | | | | | | |
| pAAV_ApoE_hAAT_HBB2ml_ | 7 | LAMPI | 94 | SERPING1 | 232 | none | |
| LAMP1.SERPING1_BGH228 | | | | | | | |
| pAAV_ApoE_hAAT_HBB2ml_ | 8 | BTN2A2 | 95 | SERPING1 | 232 | none | |
| BTN2A2.SERPING1_BGH228 | | | | | | | |
| pAAV_ApoE_hAAT_HBB2ml_ | 9 | CD300 | 96 | SERPING1 | 232 | none | |
| CD300.SERPING1_BGH228 | | | | | | | |
| pAAV_ApoE_hAAT_HBB2ml_ | 10 | NOTCH2 | 97 | SERPING1 | 232 | none | |
| NOTCH2.SERPING1_BGH228 | | | | | | | |
| pAAV_ApoE_hAAT_HBB2ml_ | 11 | STRC | 98 | SERPING1 | 232 | none | |
| STRC.SERPING1_BGH228 | | | | | | | |
| pAAV_ApoE_hAAT_HBB2ml_ | 12 | AHSG | 99 | SERPING1 | 232 | none | |
| AHSG.SERPING1_BGH228 | | | | | | | |
| pAAV_ApoE_hAAT_HBB2ml_ | 13 | SYN1 | 100 | SERPING1 | 232 | none | |
| SYN1.SERPING1_BGH228 | | | | | | | |
| pAAV_ApoE_hAAT_HBB2ml_ | 14 | SYN2 | 101 | SERPING1 | 232 | none | |
| SYN2.SERPING1_BGH228 | | | | | | | |
| pAAV_ApoE_hAAT_HBB2ml_ | 15 | SYN3 | 102 | SERPING1 | 232 | none | |
| SYN3.SERPING1_BGH228 | | | | | | | |
| pAAV_ApoE_hAAT_HBB2ml_ | 16 | SYN4 | 103 | SERPING1 | 232 | none | |
| SYN4.SERPING1_BGH228 | | | | | | | |
| pAAV_ApoE_hAAT_HBB2ml_ | 17 | SERPING1 | 259 | SERPING1c | 233 | none | |
| SERPING1coI2_BGH228 | | | | o12 | | | |
| pAAV_ApoE_hAAT_HBB2ml_ | 18 | SERPING1 | 260 | SERPING1c | 234 | none | |
| SERPING1coI3_BGH228 | | | | o13 | | | |
| pAAV_ApoE_hAAT_HBB2ml_ | 19 | SERPING1 | 261 | SERPING1c | 235 | none | |
| SERPING1coI4_BGH228 | | | | oI4 | | | |
| pAAV_ApoE_hAAT_HBB2ml_ | 20 | SERPING1 | 262 | SERPING1c | 236 | none | |
| SERPING1coI7_BGH228 | | | | o17 | | | |
| pAAV_ApoE_hAAT_HBB2ml_ | 21 | SERPING1 | 263 | SERPING1c | 237 | none | |
| SERPING1coI20_BGH228 | | | | oI20 | | | |
| pAAV_ApoE_hAAT_HBB2ml_ | 22 | SERPING1 | 264 | SERPING1c | 238 | none | |
| SERPING1co21_BGH228 | | | | o21 | | | |
| pAAV_ApoE_hAAT_HBB2ml_ | 23 | SERPING1 | 265 | SERPING1c | 239 | none | |
| SERPING1coI24_BGH228 | | | | oI24 | | | |
| pAAV_ApoE_hAAT_HBB2ml_ | 24 | SERPING1 | 266 | SERPING1c | 240 | none | |
| SERPING1coH9_BGH228 | | | | oH9 | | | |
| pAAV_ApoE_hAAT_HBB2ml_ | 25 | SERPING1 | 267 | SERPING1c | 241 | none | |
| SERPING1coH13_BGH228 | | | | oH13 | | | |
| pAAV_ApoE_hAAT_HBB2ml_ | 26 | SERPING1 | 268 | SERPING1c | 242 | none | |
| SERPING1coBC2_BGH228 | | | | oBC2 | | | |
| pAAV_ApoE_hAAT_HBB2ml_ | 27 | SERPING1 | 269 | SERPING1c | 243 | none | |
| SERPING1coI21(-RIDD)_ | | | | oI21 | | | |
| BGH228 | | | | (−RIDD) | | | |
| pSwap_ApoE_hAAT_HBB2ml_ | 28 | SERPING1 | 264 | SERPING1c | 238 | none | |
| SERPING1coI21_BGH228 | | | | o21 | | | |
| pSwap_ApoE_hAAT_HBB2ml_ | 29 | SERPING1 | 265 | SERPING1c | 239 | none | |
| SERPING1coI24_BGH228 | | | | oI24 | | | |
| pAAV_ApoE_hAAT_HBB2ml_ | 30 | SERPING1 | 84 | A76.SERPI | 244 | none | |
| A76.SERPING1_BGH228 | | | | NG1 | | | |
| AAV_ApoE_hAAT_HBB2ml_ | 31 | SERPING1 | 84 | A98.SERPI | 245 | none | |
| A98.SERPING1_BGH228 | | | | NG1 | | | |
| pSwap_ApoE_hAATv18_HBB2ml_ | 32 | SERPING1 | 264 | SERPING1c | 238 | none | |
| SERPING1coI21_BGH228 | | | | o21 | | | |
| pSwap_ApoE_hAATv18_HBB2ml_ | 33 | SERPING1 | 265 | SERPING1c | 239 | none | |
| SERPING1coI24_BGH228 | | | | oI24 | | | |
| pSwap_2xApoE_hAAT_HBB2ml_ | 34 | SERPING1 | 264 | SERPING1c | 238 | none | |
| SERPING1co21_BGH228 | | | | o21 | | | |
| pSwap_4xApoE_hAAT_HBB2ml_ | 35 | SERPING1 | 264 | SERPING1c | 238 | none | |
| SERPING1co21 BGH228 | | | | o21 | | | |
| pSwap_hAAT_HBB2ml_ | 36 | SERPING1 | 264 | SERPING1c | 238 | 2xApoE | 75 |
| SERPING1co21_2xApoE_BGH228 | | | | o21 | | | |
| pSwap_hAAT_HBB2ml_ | 37 | SERPING1 | 264 | SERPING1c | 238 | 4xApoE | 76 |
| SERPING1co21_4xApoE_BGH228 | | | | o21 | | | |
| pSwap_ApoE_hAAT_HBB2ml_ | 38 | SERPING1 | 264 | SERPING1c | 238 | hAATenh | 173 |
| SERPING1co21_hAATenh_ | | | | o21 | | | |
| BGH228 | | | | | | | |
| pSwap_ApoE_hAAT_HBB2ml | 39 | SERPING1 | 264 | SERPING1c | 238 | hAATenh | 174 |
| SERPING1co21_hAATenh(col)_ | | | | o21 | | (col) | |
| BGH228 | | | | | | | |
| pSwap_ApoE_hAAT_HBB2ml | 40 | SERPING1 | 264 | SERPING1c | 238 | WPRE3 | 175 |
| SERPING1co21_WPRE3_ | | | | o21 | | | |
| BGH228 | | | | | | | |
| pSwap_ApoE_hAAT_HBB2ml_ | 41 | SERPING1 | 264 | SERPING1c | 238 | WPRE3col | 176 |
| SERPING1co21_WPRE3col_ | | | | o21 | | | |
| BGH228 | | | | | | | |
| pSwap_ApoE_hAAT HBB2ml_ | 42 | SERPING1 | 264 | SERPING1c | 238 | WPRE | 177 |
| SERPING1co21 WPRE_BGH228 | | | | o21 | | | |
| pSwap_ApoE_hAAT HBB2ml_ | 43 | SERPING1 | 264 | SERPING1c | 238 | WPREcol | 178 |
| SERPING1co21_WPREcol_ | | | | o21 | | | |
| BGH228 | | | | | | | |
| pSwap_ApoE_hAAT_HBB2ml | 44 | SERPING1 | 264 | SERPING1c | 238 | none | |
| (−ATG)_SERPING1co21_ | | | | o21 | | | |
| BGH228 | | | | | | | |
| pSwap_ApoE_hAAT_SERPING | 45 | SERPING1 | 264 | SERPING1c | 246 | none | |
| 1co21(Intron 1-2, 2-3)_BGH228 | | | | o21(Intron | | | |
| | | | | 1-2, 2-3) | | | |
| pSwap_ApoE_hAAT_HBB2ml_ | 46 | SERPING1 | 264 | SERPING1c | 247 | none | |
| SERPING1co21(Intron 2- | | | | o21(Intron | | | |
| 3)_BGH228 | | | | 2-3) | | | |
| pSwap_ApoE_hAAT_HBB2ml_ | 47 | SERPING1 | 264 | SERPING1c | 248 | none | |
| SERPING1co21(Intron 3- | | | | o21(Intron | | | |
| 4)_BGH228 | | | | 3-4) | | | |
| pSwap_ApoE_hAAT_HBB2ml_ | 48 | SERPING1co21.P2A.SERPING1co24 | | | | none | |
| SERPING1co21.P2A.SERPING | | (SEQ ID NO: 158) | | | | | |
| lco24_BGH228 | | | | | | | |
| pAAV_ApoE_hAAT_HBB2ml_ | 49 | SERPING1 | 84 | SERPING1. | 250 | none | |
| SERPING1.Fc_BGH228 | | | | Fc | | | |
| pAAV_ApoE_hAAT_HBB2ml_ | 50 | SERPING1 | 84 | SERPING1. | 251 | none | |
| SERPING1.Fc(Ishino)_BGH228 | | | | Fc(Ishino) | | | |
| pAAV_ApoE_hAAT_HBB2ml_ | 51 | SERPING1 | 84 | SERPING1. | 252 | none | |
| SERPING1.Fc(Ying)_BGH228 | | | | Fc(Ying) | | | |
| pAAV_ApoE_hAAT_HBB2ml_ | 52 | SERPING1 | 84 | SERPING1. | 253 | none | |
| SERPING1.Fc(YTE)_BGH228 | | | | Fc(YTE) | | | |
| pAAV_ApoE_hAAT_HBB2ml_ | 53 | SERPING1 | 84 | SERPING1. | 254 | none | |
| SERPING1.Fc(LS)_BGH228 | | | | Fc(LS) | | | |
| pAAV_ApoE_hAAT_HBB2ml_ | 54 | SERPING1 | 84 | SERPING1. | 255 | none | |
| SERPING1.Fc(IFL)_BGH228 | | | | Fc(IFL) | | | |
| pSwap_ApoE_hAAT_HBB2ml_ | 55 | SERPING1 | 264 | SERPING1c | 238 | 4x mir-142-3p | 179 |
| SERPING1co21_(4x mir-142- | | | | o21 | | | |
| 3p)_BGH228 | | | | | | | |
| pAAV_ApoE_hAAT_HBB2ml_ | 56 | SERPING1 | 264 | SERPING1c | 256 | none | |
| SERPING1co21_BGH228 | | | | o21(−ORFs) | | | |
| (-ORFs) | | | | | | | |
| pSwap_ApoE_hAAT_ | 57 | SERPING1 | 264 | SERPING1c | 238 | (SERPING1 | 180 |
| SERPING1co21(SERPING1 | | | | o21 | | 5′UTR) | |
| 5′UTR)_BGH228 | | | | | | | |
| pSwap_ApoE_hAAT_HBB2ml_ | 58 | SERPING1 | 264 | SERPING1c | 257 | none | |
| SERPING1co21(Intron 2- | | | | o21(Intron | | | |
| 3)_BGH228 - SINES_LINES | | | | 2-3) | | | |
| | | | | (SINES_ | | | |
| | | | | LINES) | | | |
| pSwap_ApoE_hAAT_HBB2ml_ | 59 | SERPING1 | 264 | SERPING1c | 172 | none | |
| SERPING1co21(Intron 3-4)_ | | | | o21(Intron | | | |
| BGH228 - SINES_LINES | | | | 3-4) | | | |
| | | | | (SINES_ | | | |
| | | | | LINES) | | | |
| pSwap_ApoE_hAAT_ | 60 | SERPING1 | 264 | SERPING1c | 238 | SERPING1 | 181 |
| SERPING1co21(SERPINGIAPRE/ | | | | o21 | | APRE/5′UTR | |
| 5′UTR)_BGH228 | | | | | | | |
| pSwap_ApoE_hAAT_ | 61 | SERPING1 | 264 | SERPING1c | 238 | SERPING1 | 182 |
| (SERPING1 APRE) | | | | o21 | | APRE | |
| HBB2ml_SERPINGIco21_BG | | | | | | | |
| H228 | | | | | | | |
| pSwap_ApoE_hAAT_HBB2ml_ | 62 | SERPING1 | 264 | SERPING1c | 238 | SAA2 5′UTR | 183 |
| SERPING1co21_BGH228 | | | | o21 | | | |
| (SAA2 5′UTR) | | | | | | | |
| pSwap_ApoE_hAAT_HBB2ml_ | 63 | SERPING1 | 264 | SERPING1c | 238 | SAA2 3′ UTR | 184 |
| SERPING1co21_BGH228 | | | | o21 | | | |
| (SAA2 3′ UTR) | | | | | | | |
| pSwap_ApoE_hAAT_HBB2ml_ | 64 | SERPING1 | 264 | SERPING1c | 238 | SAA2 5′&3′ | 183, |
| SERPING1co21_BGH228 | | | | o21 | | UTR | 184 |
| (SAA2 5′&3′ UTR) | | | | | | | |
| pSwap_ApoE_hAAT(APRE- | 65 | SERPING1 | 264 | SERPING1c | 238 | SAA2 5′ | 183 |
| SAA2)_HBB2ml_(SAA2 | | | | o21 | | | |
| 5′)SERPING1co21_BGH228 | | | | | | | |
| pSwap_(2xADRES) | 66 | SERPING1 | 264 | SERPING1c | 238 | none | |
| ApoE_hAAT_HBB2ml_ | | | | o21 | | | |
| SERPING1co21_BGH228 | | | | | | | |
| pSwap_ApoE_hAAT_HBB2ml_ | 67 | SERPING1 | 264 | SERPING1c | 238 | RIDD1x | 185 |
| SERPING1co21(+RIDD1x)_BG | | | | o21 | | | |
| H228 | | | | | | | |
| pSwap_ApoE_hAAT_HBB2ml_ | 68 | SERPING1 | 264 | SERPING1c | 238 | RIDD3x | 186 |
| SERPING1co21(+RIDD3x)_BG | | | | o21 | | | |
| H228 | | | | | | | |
| pSwap_ApoE_hAAT_HBB2ml_ | 69 | SERPING1 | 264 | SERPING1c | 238 | RIDD1xBlos | 187 |
| SERPING1co21(+RIDD1xBlos) | | | | o21 | | | |
| BGH228 | | | | | | | |

pAAV = 5′ ITR SEQ ID NO: 70, 3′ ITR SEQ ID NO: 71; pSWAP = 5′ ITR SEQ ID NO: 72, 3′ ITR SEQ ID NO: 73; ApoE = SEQ ID NOs: 225, 74-76; SSA2 APRE = SEQ ID NO: 77; 2x ADRES = SEQ ID NO: 78; hAAT = SEQ ID NO: 79; hAATv18 = SEQ ID NO: 80; HBB2ml = SEQ ID NO: 81; HBB2ml(-ATG) = SEQ ID NO: 82; BGH228 = SEQ ID NO: 83.

[0362] Expression cassettes are packaged in an AAV viral particle by being encapsidated in an AAV capsid, e.g., AAV-4-1 capsid variant, described in International Patent Application publication WO 2016/210170, the contents of which are incorporated by reference herein in their entirety, or LK03 capsid variant, described in U.S. Pat. No. 9,169,299, the contents of which are incorporated by reference herein in their entirety. Viral particles are generally produced using the triple transfection protocol well-known in the art.

### Example 2—Assessment of Vector Potency of SERPING1-Expressing Vectors Encapsidated in AAV in C57BL/6J Mice at 2 Doses

### Objective

[0363] In an effort to develop a SERPING1 transgene with improved secretion from the liver, the endogenous SERPING1 signal peptide was replaced with a panel of naturally occurring and synthetic peptides that were selected from initial in vitro screening studies. The naturally occurring signal peptides corresponded to those of alpha-2-HS-glycoprotein (AHSG) and chymotrypsinogen B2 (sp7); the synthetic peptides, referred to as Synthetic 1 (Syn1) and Synthetic 4 (Syn4), were derived through rational design. A non-GLP study was performed in C57BL/6J mice to evaluate the potency of 5 SERPING1-expressing vectors with different signal peptide sequences at two doses via intravenous injection (Vector SEQ ID NOs: 1, 13, 16, 12, and 2).

[0364] The study included 100 male C57BL/6J wild-type mice aged 11-12 weeks. Four candidate cassettes containing heterologous signal peptides were benchmarked against the native human SERPING1 signal peptide. All expression cassettes contained the native SERPING1 cDNA sequence. Other regulatory elements of the cassette that were common for the 5 vectors included an apolipoprotein E hepatic control region 1 (ApoE HCR-1) enhancer, a human alpha-1 antitrypsin (hAAT) promoter, a modified human hemoglobin R (HBB)-derived synthetic intron (HBB2), and a CpG-reduced bovine growth hormone (bGH) polyadenylation (polyA) signal sequence. All cassettes were packaged in a bioengineered AAV capsid. The vectors utilized in this study are detailed below in Table 2. Mice (n=10-11/group) were injected with a low (1.0×10¹² vg/kg) or high (4.0×10¹² vg/kg) dose of the specified vector (Table 3). Animals were monitored over the course of either 18 weeks for Groups 7-11 (low dose cohort) or 28 weeks for Groups 1-5 (high dose cohort). Human C1-INH antigen levels, C1-INH activity, and liver transduction were assessed as detailed in Table 4.

TABLE 2
Characteristics of 5 vectors evaluated in this study

| | Vector SEQ | signal | sp length |
|---|---|---|---|
| SERPING1 sequence | ID NO | peptide (sp) | (bp) |
| Native SERPING1 | 1 | SERPING1 | 66 |
| cDNA SEQ ID NO: 104; | 13 | Syn1 | 63 |
| without signal peptide | 16 | Syn4 | 66 |
| coding sequence (SEQ ID | 12 | AHSG | 54 |
| NO: 232) | 2 | sp7 | 54 |

TABLE 3
Group designation and dose level

| Dose (vg/kg)ª | Vector SEQ ID NO | Group | No. of Males |
|---|---|---|---|
| 4.0 × 10¹² | 1 | 1 | 10 |
| | 13 | 2 | 10 |
| | 16 | 3 | 10 |
| | 12 | 4 | 10 |
| | 2 | 5 | 10 |
| 1.0 × 10¹² | 1 | 7 | 10 |
| | 13 | 8 | 10 |
| | 16 | 9 | 11 |
| | 12 | 10 | 10 |
| | 2 | 11 | 11 |

^{a}The vector dose was estimated based on the assumed mouse body weight of 25 g.

TABLE 4
Analyses performed

| Analysis | Parameter | Assay | Timepoints |
|---|---|---|---|
| Circulating | Human C1-INH | ELISA | Kit-based: Weeks 3, 6, |
| Human | Antigen in Plasma | (Kit-based | 12, 14, 16, 18, 20, 22, 25, |
| C1-INH | | and custom) | and 27 |
| | | | Custom: Weeks 8, 28 |
| Functional | Human C1-INH | Enzymatic | Weeks 22, 25, 27 |
| Human | Activity in Plasma | | (high dose cohort only) |
| C1-INH | | | |
| Liver | Vector Genome | qPCR | Terminusª |
| Transduction | Concentration | | |
| | in Liver | | |

^{a}Terminus was defined as Week 18 for the low dose cohort (1.0 × 10¹² vg/kg, Groups 7-11), and Week 28 for the high dose cohort (4.0 × 10¹² vg/kg, Groups 1-5).
ELISA, enzyme-linked immunosorbent assay; qPCR, real-time quantitative polymerase chain reaction.

[0365] Results

[0366] Human C1-INH Antigen Levels in Mouse Plasma

[0367] To assess the production and secretion of protein encoded by the SERPING1 expression cassette, C1-INH antigen levels were assessed in plasma of animals administered one of the 5 vectors at a low (1.0×10¹² vg/kg) or high (4.0×10¹² vg/kg) dose starting at Week 3 until terminus of study, either at Week 18 (low dose cohort, Groups 7-11) or Week 28 (high dose cohort, Groups 1-5).

[0368] C1-INH antigen levels were quantified using a kit-based ELISA Kit (Molecular Innovations, #HC1INHKIT-TOT) and also using a custom sandwich-style ELISA capture assay using plates coated with anti-human C1-INH IgG (Affinity Biologicals, #GACINH-AP) and anti-human C1-INH HRP-conjugated IgG (Affinity Biologicals, #GACINH-HRP) for detection.

[0369] Regardless of dose, mice that received AAV-encapsidated SEQ ID NO: 1 (Group 7, low dose cohort or Group 1, high dose cohort) consistently expressed the highest mean levels of detectable human C1-INH antigen compared with all other groups (FIG. 2). In the low dose cohort, only mice treated with AAV-encapsidated SEQ ID NO:1 had levels of C1-INH consistently greater than pooled normal human plasma. Conversely, administration of all signal peptide variants at the high vector dose resulted in sustained, supraphysiologic levels of plasma C1-INH for at least 28 weeks following vector administration. Over the 6 month experiment, expression levels were 9-fold greater than normal and no morbidity or mortality were observed.

[0370] Steady-state C1-INH antigen levels, defined as no significant difference in mean antigen levels across assessed timepoints (linear regression analysis, not shown), were significantly greater in animals that received AAV-encapsidated SEQ ID NO: 1 compared with animals that received AAV-encapsidated SEQ ID NOs: 13, 16, and 12 at both vector doses (FIG. 3). In animals treated with AAV-encapsidated SEQ ID NO: 1 at the low and high dose, mean±SD human C1-INH levels in plasma remained stable at 315.01±32.98 μg/mL and 1321.79±302.97 μg/mL, respectively; these steady-state levels corresponded to a 1.58- to 3.27-fold higher level of plasma C1-INH antigen relative to all other constructs across both dose cohorts.

[0371] In summary, the vector cassette containing the native SERPING1 signal peptide (AAV-encapsidated SEQ ID NO: 1) outperformed the other 4 vectors in vivo in terms of C1-INH antigen production and secretion, regardless of dose.

### Activity of Human C1-INH in Mouse Plasma

[0372] To assess human C1-INH function in plasma, samples from the high dose cohort (Groups 1-5) were tested for activity via a chromogenic assay at Weeks 22, 25, and 27 using a modified version of the Technochrom C1-INH kit (Diapharma, 5345003). In the assay, plasma C1-INH was titrated against an excess of C1-esterase, and the residual C1-esterase activity was measured. Activity levels were reported as percentage of activity relative to a coagulation reference standard.

[0373] Steady-state human C1-INH activity levels were significantly elevated in animals dosed with AAV-encapsidated SEQ ID NO: 1 compared with the other signal peptide variants (p<0.0001) (FIG. 4). Activity levels in animals dosed with AAV-encapsidated SEQ ID NO: 1 at 4.0×10¹² vg/kg reached a steady-state value of 766.30% activity. Additionally, human C1-INH activity had a positive correlation with antigen levels, suggesting a direct linear relationship and that functional C1-INH was produced (Pearson r=0.8778, p<0.0001, R²=0.771) (FIG. 5).

[0374] Normalized Vector Genome Concentration in Liver Tissue-qPCR

[0375] To assess target tissue transduction following intravenous AAV vector administration, terminal liver samples were analyzed for vector genome concentration using a real-time quantitative PCR (qPCR) assay. DNA was extracted from terminal liver samples using a modified DNA extraction method with the QIAamp Fast DNA Tissue Kit (Qiagen, Cat #51404).

[0376] The bGH polyA signal was selected as the AAV target, as it was a component of all candidate expression cassettes. Mouse forkhead box P1 (Foxp1) was targeted to measure genomic DNA concentration between samples and to remove non-biological variation. Final copy numbers for bGH polyA were normalized to Foxp1 and were reported as bGH polyA copies per Foxp1 copies (FIG. 6). As expected, vector genome copies in terminal liver were greater in animals that received the higher vector dose compared with the lower vector dose (FIG. 5). In both dose cohorts, animals administered AAV-encapsidated SEQ ID NO: 1 consistently displayed the highest mean vector genome concentration in the target tissue, with significantly greater levels compared with animals administered AAV-encapsidated SEQ ID NOs: 16 and 12. Additionally, C1-INH antigen levels had a positive correlation with relative vector genome copies across both dose cohorts, demonstrating the expected direct relationship between these two parameters (Pearson r=0.9306, p<0.0001, R²=0.866) (FIG. 7).

### Vector Potency of Signal Peptide Variants

[0377] To compare the potency of the signal peptide variants, steady-state C1-INH antigen levels were normalized to terminal liver vector genome copies in both low and high vector dose cohorts (FIG. 8). While no difference in vector potency was observed across animals in the low vector dose groups, animals that received the high vector dose of AAV-encapsidated SEQ ID NO: 16 displayed an increase in normalized steady-state C1-INH antigen levels compared with AAV-encapsidated SEQ ID NO: 1; variability in vector genome copies for AAV-encapsidated SEQ ID NO: 1 may have contributed to the observed difference in potency.

[0378] Conclusions

[0379] This study evaluated C1-INH antigen levels, C1-INH activity, and vector genome copies derived from 5 candidate expression cassettes containing unique signal peptide encoding sequences. Out of the 5 vectors tested, the vector containing the native human SERPING1 signal peptide-encoding sequence in its transgene cassette (AAV-encapsidated SEQ ID NO: 1; Groups 7 and 1) exhibited the highest steady-state C1-INH antigen, C1-INH activity levels, and terminal vector genome concentration, irrespective of dose. As differences in potency were minimal, the results indicate that AAV-encapsidated SEQ ID NO: 1 had the strongest response compared with vectors containing other signal peptides in the context of the AAV capsid in wild-type mice.

### Example 3—Assessment of Vector Potency of Optimized SERPING1-Expressing Vectors Encapsidated in AAV in C57BL/6J Mice at a Single Dose Objective

[0380] Two non-GLP studies (A and B) were performed in C57BL/6J mice to evaluate the vector potency of 13 unique human SERPING1-expressing vectors via intravenous injection. The SERPING1 transgene variants were generated using codon optimization (Integrated DNA Technologies (IDT) Codon Optimization Tool, Codon Harmonizer, and Best Codon scripts) as well as truncation strategies (Table 5). The selected variants previously demonstrated high C1-INH secretion in an in vitro screening study.

[0381] The two studies included a total of 80 male C57BL/6J wild-type mice aged 9-10 weeks. Twelve candidate cassettes were evaluated against the native human SERPING1 cDNA sequence. Other regulatory elements of the cassette that were maintained in all vectors included an apolipoprotein E hepatic control region 1 (ApoE HCR-1) enhancer, a human alpha-1 antitrypsin (hAAT) promoter, a modified human hemoglobin R (HBB)-derived synthetic intron (HBB2), and a CpG-reduced bovine growth hormone (bGH) polyadenylation (polyA) signal sequence. All cassettes were packaged in a bioengineered AAV capsid. Five animals per group were injected with a 1.0×10¹² vg/kg dose of the specified vector (Tables 6 and 7) and animals were monitored over the course of either 7 weeks in Study A or 6 weeks in Study B. Human C1-INH antigen, bradykinin antigen, and vector genome concentration were assessed as detailed in Table 8.

TABLE 5
Characteristics of 13 vectors evaluated in studies A and B

| Vector | | | Codon |
|---|---|---|---|
| SEQ | | Transgene | Optimization |
| ID NO | CDNA | Modification | Script |
| 1 | SERPING1 | — | — |
| 18 | I3 | Codon Optimized | IDT |
| 19 | I4 | Codon Optimized | IDT |
| 20 | I7 | Codon Optimized | IDT |
| 21 | I20 | Codon Optimized | IDT |
| 22 | I21 | Codon Optimized | IDT |
| 23 | I24 | Codon Optimized | IDT |
| 17 | I2 | Codon Optimized | IDT |
| 24 | H9 | Codon Optimized | Harmonized |
| 25 | H13 | Codon Optimized | Harmonized |
| 26 | BC2 | Codon Optimized | Best Codon |
| 30 | Δ76 | 76 amino acid truncation | — |
| | | from 5' end | |
| 31 | Δ98 | 98 amino acid truncation | — |
| | | from 5' end | |

TABLE 6
Group designation and dose level for Study A

| | Vector SEQ | No. of Animals | Dose Level | Dose Concentration |
|---|---|---|---|---|
| Group | ID NO | (Male) | (vg/kg) | (vg/mouse) ª |
| 1 | 1 | 5 | 1.0 × 10¹² | 2.5 × 10¹⁰ |
| 2 | 18 | 5 | 1.0 × 10¹² | 2.5 × 10¹⁰ |
| 3 | 19 | 5 | 1.0 × 10¹² | 2.5 × 10¹⁰ |
| 4 | 20 | 5 | 1.0 × 10¹² | 2.5 × 10¹⁰ |
| 5 | 21 | 5 | 1.0 × 10¹² | 2.5 × 10¹⁰ |
| 6 | 22 | 5 | 1.0 × 10¹² | 2.5 × 10¹⁰ |
| 7 | 23 | 5 | 1.0 × 10¹² | 2.5 × 10¹⁰ |
| 8 | Excipient | 5 | n/a | n/a |

^{a} The vg/kg vector dose was estimated based on the assumed mouse body weight of 25 g.

TABLE 7
Group designation and dose level for Study B

| | Vector SEQ | No. of Animals | Dose Level | Dose Concentration |
|---|---|---|---|---|
| Group | ID NO | (Male) | (vg/kg) | (vg/mouse) ^{a} |
| 1 | 1 | 5 | 1.0 × 10¹² | 2.5 × 10¹⁰ |
| 2 | 17 | 5 | 1.0 × 10¹² | 2.5 × 10¹⁰ |
| 3 | 24 | 5 | 1.0 × 10¹² | 2.5 × 10¹⁰ |
| 4 | 25 | 5 | 1.0 × 10¹² | 2.5 × 10¹⁰ |
| 5 | 26 | 5 | 1.0 × 10¹² | 2.5 × 10¹⁰ |
| 6 | 30 | 5 | 1.0 × 10¹² | 2.5 × 10¹⁰ |
| 7 | 31 | 5 | 1.0 × 10¹² | 2.5 × 10¹⁰ |
| 8 | Excipient | 5 | n/a | n/a |

^{a} The vg/kg vector dose was estimated based on the assumed mouse body weight of 25 g.

TABLE 8
Analyses performed

| Analysis | Parameter | Assay | Timepoints |
|---|---|---|---|
| Circulating Human | Human C1-INH | ELISA | Weeks 1, 2, 3, |
| C1-INH in Plasma | Antigen | | 4, 5, 6, 7ª |
| Circulating | Bradykinin Antigen | ELISA | Week 7ª |
| Bradykinin in Plasma | | | |
| Liver Transduction | Vector Genome | qPCR | Terminus^{b} |
| | Concentration in Liver | | |

^{a}Time point was evaluated in Study A only. For circulating bradykinin in plasma, only Groups 4, 6, and 8 from Study A were included in the analysis.
^{b}Terminus was defined as Week 7 for Study A and Week 6 for Study B. ELISA, enzyme-linked immunosorbent assay; qPCR, quantitative polymerase chain reaction.

### Results

### C1-INHAntigen in Plasma

[0382] To assess the in vivo production of C1-INH antigen from the modified (codon optimized or truncated) SERPING1 expression cassettes, circulating C1-INH antigen levels were assessed by ELISA (Molecular Innovations, #HC1INHKIT-TOT). C1-INH antigen assessments began 1 week following vector administration and continued weekly until study terminus.

[0383] The candidate vectors in Study A generally yielded higher levels of plasma C1-INH antigen compared with Study B and are the focus of Example 3. Following vector administration, levels of mean plasma C1-INH peaked around Week 3 (±1 week) in most groups, followed by a decline (FIG. 9). The highest peak antigen level at Week 3 (±1 week) reached a mean±SD of 722.31±242.03 μg/mL in mice that received AAV-encapsidated SEQ ID NO: 22. Compared with the parental cassette (AAV-encapsidated SEQ ID NO: 1), mice administered AAV-encapsidated SEQ ID NOs: 22, 23, 20, and 18 displayed similar or higher levels of plasma C1-INH throughout the course of the study; the vectors also exceeded mean±SD levels of pooled normal human plasma (179.2±20.88 μg/mL) by Week 2 that persisted for the duration of the study.

[0384] In Study A, the relative steady-state (i.e., no significant difference in mean antigen levels across all timepoints tested, one-way ANOVA analysis not shown) C1-INH antigen levels in animals that received either AAV-encapsidated SEQ ID NO: 22 or AAV-encapsidated SEQ ID NO: 23 was significantly greater than in animals that received AAV-encapsidated SEQ ID NO: 1 (1.75-fold and 1.3-fold greater, respectively) (FIG. 9).

[0385] In Study B, steady-state C1-INH antigen levels were similar in animals that received AAV vectors containing codon-optimized SERPING1 variants relative to AAV-encapsidated SEQ ID NO: 1 (FIG. 9). However, animals that received AAV-encapsidated SEQ ID NO: 24 exhibited a 50% reduction in steady-state C1-INH antigen levels compared with AAV-encapsidated SEQ ID NO: 1 (119.89±69.29 μg/mL versus 237.10±55.88 μg/mL, respectively). An initial peak in C1-INH levels was observed around Weeks 3 and 4 in most groups, followed by a decline in antigen levels (FIG. 10). The highest peak antigen levels at Weeks 3 and 4 reached a mean±SD of 299.19±110.92 μg/mL in mice dosed with AAV-encapsidated SEQ ID NO: 17, followed by 289.45±56.12 μg/mL in the AAV-encapsidated SEQ ID NO: 25 group. Both variants expressed higher mean±SD peak levels of C1-INH antigen relative to the parental cassette (287.32±76.21 μg/mL). Similar to Study A, an increase in circulating C1-INH levels was observed in several groups following the initial decline in antigen levels. At study terminus, the highest mean±SD levels of C1-INH antigen were 347.69±139.64 μg/mL in the AAV-encapsidated SEQ ID NO: 17 and 297.57±56.74 μg/mL in the AAV-encapsidated SEQ ID NO: 25 groups. Although peak C1-INH levels in these groups exceeded both the parental cassette and PNP values, the highest antigen levels observed in Study B were less than those displayed by the 3 highest C1-INH-expressing variants in Study A. In animals that received AAV vectors containing truncated SERPING1 variants (Δ76 and Δ98), the levels of C1-INH antigen declined and remained below the limit of quantitation from Week 4 through study end.

[0386] Taken together, administration of several codon-optimized, SERPING1-expressing variants resulted in steady-state C1-INH antigen levels 1.13-fold to 1.75-fold greater than the parental cassette across both studies as well as the pooled normal human plasma range. Across both studies, AAV-encapsidated SEQ ID NO: 22, AAV-encapsidated SEQ ID NO: 23, and AAV-encapsidated SEQ ID NO: 20 from Study A displayed the highest levels of plasma C1-INH antigen.

### Bradykinin Levels in Plasma

[0387] To evaluate the downstream effect of C1-INH, plasma bradykinin was assessed by ELISA at study terminus (Enzo Life Sciences, product #ADI-900-206, at room temperature). Bradykinin was measured in 2 variants with higher levels of C1-INH antigen, AAV-encapsidated SEQ ID NO: 22 and 20 (Study A), at Week 7.

[0388] At study terminus, circulating bradykinin levels were significantly reduced in mice administered either AAV-encapsidated SEQ ID NO: 22 or 20, reaching levels less than 3% of plasma bradykinin in excipient-treated mice (FIG. 11). As expected, levels of plasma bradykinin were inversely correlated with plasma C1-INH, with a stronger inverse correlation observed in the AAV-encapsidated SEQ ID NO: 22 group (Pearson r=−0.9417, p<0.0168, R²=0.8867) compared with the AAV-encapsidated SEQ ID NO: 20 group (Pearson r=−0.6383, p=ns, R²=0.4074). Taken together, sustained supraphysiologic levels of human C1-INH were associated with significant reductions in plasma bradykinin in wild-type mice.

### Normalized Vector Genome Concentration in Liver Tissue

[0389] To assess target tissue transduction following intravenous AAV vector administration, vector genome concentration in terminal liver samples was evaluated using a real-time quantitative PCR (qPCR) assay. Copy numbers of the shared polyadenylation signal (bGH poly A) were normalized to copies of the mouse Foxp1 gene.

[0390] There was no statistical difference in normalized vector genome concentration at terminus among AAV-encapsidated SEQ ID NO: 1 and the six codon-optimized variants in Study A (FIG. 12A).

[0391] In Study B, mean terminal liver vector genome copies among AAV-encapsidated SEQ ID NO: 1 and the six codon-optimized or truncated SERPING1 variants ranged from 0.0388 to 0.0936 BGHpA copies per Foxp1 copies in the AAV-encapsidated SEQ ID NO: 24 and 17 groups, respectively. Subsequent to the AAV-encapsidated SEQ ID NO: 17 group, vector genome concentration was highest in animals administered AAV-encapsidated SEQ ID NO: 1 and 26 (0.0829 and 0.0785 BGHpA copies per Foxp1 copies, respectively). There was no statistical difference in normalized vector genome concentration at terminus between all SERPING1-expressing vectors (FIG. 12B). Terminal vector genome concentration in animals that received AAV-encapsidated SEQ ID NO: 30 and 31 (0.0417 and 0.0606, respectively) indicated that liver transduction occurred and was comparable to remaining vectors in the study. AAV encapsidated SEQ ID NO: 30 and 31 provided lower levels of circulating C1EI (data not shown).

[0392] A positive correlation between C1-INH antigen and relative vector genome copies was observed for AAV-encapsidated SEQ ID NO: 1 and the codon-optimized variants with the highest C1-INH antigen expression (SEQ ID NOs: 20, 22, and 23) (Pearson r=0.8510, p<0.0001, R²=0.7243), demonstrating a direct relationship between these two parameters (FIG. 13).

### Vector Potency of Codon Optimized Variants

[0393] To evaluate the effect of codon-optimization on vector potency, steady-state C1-INH antigen levels were normalized to relative vector genome copies in terminal liver samples (FIG. 14). With the exception of mice that received AAV-encapsidated SEQ ID NO: 21, no differences in vector potency were observed between the parental cassette (AAV-encapsidated SEQ ID NO: 1) and the codon optimized variants in Study A; mice that received AAV-encapsidated SEQ ID NO: 21 showed a reduction in vector potency.

### Conclusions

[0394] Taken together, AAV-mediated delivery of codon optimized SERPING1 transgenes resulted in elevated and sustained levels of functional C1-INH in wild-type mice.

### Example 4—Dose Range Assessment of Codon-Optimized SERPING1 Vectors Encapsidated in AAV in Serping1 Knockout Mice

### Objective

[0395] A non-GLP study was performed in 129/S5×C57BL/6J-Tyrc-Brd (Serping1^{-/-} or C1-INH knockout or C1-INH null) mice to evaluate the vector potency of a codon-optimized human SERPING1-expressing vector (AAV-encapsidated SEQ ID NO: 20) at three doses via intravenous injection in a disease model.

[0396] The current study included 20 male and 19 female C1-INH knockout mice aged 13-18 weeks. Up to five animals per group were injected with one of three doses (1.0×10¹², 4.0×10¹², or 1.0×10¹³ vg/kg) of AAV-encapsidated SEQ ID NO: 20 (Table 9). In addition to the codon-optimized transgene, regulatory elements of the cassette included an apolipoprotein E hepatic control region 1 (ApoE HCR-1) enhancer, a human alpha-1 antitrypsin (hAAT) promoter, a modified human hemoglobin R (HBB)-derived synthetic intron (HBB2), and a CpG-reduced bovine growth hormone (bGH) polyadenylation (polyA) signal sequence. The cassette was packaged in the AAV-4-1 capsid. Animals were monitored over the course of 8 weeks. Plasma C1-INH antigen levels, C1-INH activity, liver vector genome concentration, and SERPING1 mRNA expression were assessed as detailed in Table 10.

TABLE 9
Group designation and dose level

| | | | | Approxi- | | Dose |
|---|---|---|---|---|---|---|
| | | | | mate | | Concen- |
| | | | | Age at | Dose | tration |
| | | Vector | No. of | Dosing | Level | (vg/ |
| Sex | Group | sequence | Animals | (Weeks) | (vg/kg) | mouse) ^{a} |
| Male | 1 | SEQ ID | 3 | 18 | 1.0 × 10¹² | 2.5 × 10¹⁰ |
| | | NO: 20 | | | | |
| | 2 | SEQ ID | 5 | 16 | 4.0 × 10¹² | 1.0 × 10¹¹ |
| | | NO: 20 | | | | |
| | 3 | SEQ ID | 5 | 16 | 1.0 × 10¹³ | 4.0 × 10¹¹ |
| | | NO: 20 | | | | |
| | 4 | Excipient | 1 | 14 | n/a | n/a |
| | 5 | SEQ ID | 2 | 13 | 1.0 × 10¹² | 2.5 × 10¹⁰ |
| | | NO: 20 | | | | |
| | 6 | Excipient | 4 | 13 | n/a | n/a |
| Female | 7 | SEQ ID | 5 | 14-16 | 1.0 × 10¹² | 2.5 × 10¹⁰ |
| | | NO: 20 | | | | |
| | 8 | SEQ ID | 5 | 13-14 | 4.0 × 10¹² | 1.0 × 10¹¹ |
| | | NO: 20 | | | | |
| | 9 | SEQ ID | 5 | 13 | 1.0 × 10¹³ | 4.0 × 10¹¹ |
| | | NO: 20 | | | | |
| | 10 | Excipient | 4 | 13 | n/a | n/a |

^{a} The vg/kg vector dose was estimated based on the assumed mouse body weight of 25 g.
n/a, not applicable.

TABLE 10
Analyses performed

| Analysis | Parameter | Assay | Timepoints |
|---|---|---|---|
| Circulating Human | Human C1-INH | ELISA (Kit- | Kit-based: Weeks |
| C1-INH in Plasma | Antigen | based and | 1, 4, and 5 |
| | | custom) | Custom: Weeks |
| | | | 6, 7, and 8 |
| Functional Human | Human C1-INH | Enzymatic | Weeks 5, 8 |
| C1-INH in Plasma | Activity | | |
| Liver Transduction | Vector Genome | qPCR | Terminusª |
| | Concentration | | |
| AAV Transcription | mRNA Expression | RT-qPCR | Terminusª |
| in Liver | Levels | | |

^{a}Terminus was defined as Week 8.
AAV, adeno-associated virus;
C1-INH, C1 inhibitor;
ELISA, enzyme-linked immunosorbent assay;
qPCR, quantitative polymerase chain reaction;
RT-qPCR, quantitative reverse transcription polymerase chain reaction.

### Results

[0397] C1-INHAntigen in Plasma

[0398] C1-INH antigen levels were quantified using a kit-based ELISA and custom sandwich-style ELISA capture assay, as described in Example 2.

[0399] Circulating C1-INH antigen was assessed by ELISA beginning 1-week post-injection and was monitored weekly from Week 4 to Week 8 (study terminus). A dose-dependent increase in mean plasma C1-INH antigen levels was observed in male and female mice from Week 4 to Week 8 (FIG. 15). At the intermediate (4.0×10¹² vg/kg) and high (1.0×10¹³ vg/kg) vector doses, all animals displayed detectable levels of C1-INH by Week 4. Regardless of sex, mice that received the intermediate or high dose vector displayed mean plasma C1-INH levels at or above pooled normal human plasma (PNP; mean±SD=175.4±41.3 μg/mL) by Week 4 that persisted to study terminus. Male mice displayed higher mean antigen levels compared with female mice at the intermediate and high vector doses, which may be attributed to higher hepatic transduction following AAV administration in male mice compared with female mice (Davidoff et al., Blood. 2003; 102(2):480-488).

[0400] Taken together, administration of AAV-encapsidated SEQ ID NO: 20 yielded a dose-dependent increase in CT-INH antigen levels, with higher absolute antigen levels observed in males than females.

[0401] An orthogonal approach was used to compare methods of human CT-INH antigen detection. At Week 5, C1-INH antigen was assessed by ELISA as well as an additional capillary electrophoretic immunoassay (Wes) in male mice administered the low or intermediate vector dose.

[0402] At the low vector dose (1.0×10¹² vg/kg), mean C1-INH values and variation (standard deviation) were comparable across ELISA and Wes approaches, although the relative levels of C1-INH antigen between animals was not consistent between quantification methods. At the intermediate vector dose (4.0×10¹² vg/kg), an increase in C1-INH values was observed using both techniques compared with the lower vector dose. However, mean C1-INH values detected by ELISA were nearly twice the levels quantified by Wes (1063.99 μg/mL vs 547.25 μg/mL); the sample variability using Wes was also greater than ELISA at the intermediate vector dose.

[0403] Correlation analysis of C1-INH antigen and activity using two different methods of antigen detection revealed a slightly stronger correlation when C1-INH antigen was assessed by ELISA (R²=0.995) compared with Wes (R²=0.993) (data not shown). As the sample size for this comparison was relatively small (n=9 total samples) and limited by vector dose and animal sex, a larger and more comprehensive sample population may provide further insight on the utility of each antigen detection method.

C1-INHAntigen vs. Activity in Mouse Plasma Correlation

[0404] To determine the biological activity of the transgene product encoded by SEQ ID NO: 20, C1-INH activity was assessed by a chromogenic assay in which C1-INH is titrated against an excess of C1-esterase and residual C1-esterase activity is measured. C1-INH activity was assessed in male and female mice of all dose cohorts on Weeks 5 and 8 post-vector administration. C1-INH activity, reported as a percentage of activity relative to a coagulation reference standard, was compared with C1-INH antigen levels.

[0405] A positive correlation was observed between C1-INH activity and C1-INH antigen across all SEQ ID NO: 20 treatment groups (R²=0.981; FIG. 16). Consistent with antigen levels, male mice that received the high vector dose had the greatest levels of C1-INH activity. In addition, male mice in the high and intermediate vector dose cohorts often displayed higher levels of C1-INH activity compared with dose-matched females.

### Normalized Vector Genome Concentration in Liver Tissue-qPCR

[0406] To assess target tissue transduction following vector administration, terminal (Week 8) liver samples were analyzed for vector genome concentration as previously described.

[0407] A dose-dependent increase in vector genome concentration was observed in the liver of male and female mice, confirming functional transduction of the target organ (FIG. 17). Higher levels of hepatic transduction were observed in male mice administered AAV-encapsidated SEQ ID NO: 20 compared with dose-matched female mice, consistent with previous reports of sex influencing AAV transduction of the murine liver (Davidoff et al., Blood. 2003; 102(2):480-488). The mean liver vector genome concentrations in male mice administered the high and intermediate dose of AAV-encapsidated SEQ ID NO: 20 were approximately twice the concentration observed in dose-matched females.

Normalized mRNA Expression Levels in Liver Tissue

[0408] SERPING1 mRNA expression was quantified using qRT-PCR in terminal (Week 8) liver samples. SERPING1 mRNA was normalized to mouse peptidyl-prolyl cis-trans isomerase E (Ppie) and was reported as SERPING1 copies per Ppie copies.

[0409] Consistent with vector genome concentration, a dose-dependent increase in transgene expression was observed in male and female mice (FIG. 18). Furthermore, average transgene expression in males was greater than females administered the same vector dose.

[0410] A comparison of vector dose with vector are stabilized in the null mice (C1-INH knockout) study.

### Conclusions

[0411] Administration of AAV-encapsidated SEQ ID NO: 20 at doses of 4.0×10¹² vg/kg (intermediate dose) and 1.0×10¹³ vg/kg (high dose) were capable of restoring circulating levels of C1-INH antigen to physiologic or supraphysiologic levels in C1-INH knockout male and female mice. Consistent with previous reports in mice, a sex-specific response was observed following AAV-mediated, liver-directed gene delivery.

### Example 5—Characterization of Serping1 Deficiency on a B6.SJL Mouse Background (FIG. 20)

[0412] Serping1^{-/-} mice on the C57BL/6×SJL background (Molecular Innovations) were used as a model of HAE. In experiments conducted to characterize the commercially available mouse model, no vascular permeability differences were observed between the strain-matched wild-type control and the Serping1^{-/-} mice, as assessed by Evan's blue dye extravasation (data not shown and FIG. 20A) paw volume plethysmography. Clear differences were observed in FIG. 20B) plasma C1-INH, FIG. 20C) bradykinin, FIG. 20D) C4a, and FIG. 20E) tissue plasminogen activator (tPA). While C1-INH, C4a, and tPA followed an expected relationship with C1-INH, bradykinin levels appeared to be increased, rather than decreased, in the presence of endogenous mCI-INH.

### Example 6—I21 (SEQ ID NO: 22) Drives Dose-Dependent, Durable hC1-INH Antigen Levels in Plasma of HAE Model Mice (FIG. 21)

[0413] Plasma hC1-INH levels in FIG. 21A) B6/SJL^{serpng+/+}, FIG. 21B) B6/SJL^{serping1+/-} and FIG. 21C) B6/SJL^{serping-1-/-} male mice were injected with one of three doses of AAV-encapsidated I21 (SEQ ID 22), ranging from 1.0×10¹² to 3.16×10¹² vg/kg in quarter-log increments. These doses were intended to span a potential threshold of functional C1-INH in the presence of varied levels of endogenous mC1-INH, under which it is theoretically possible that constitutive low-level complement activation would result in accelerated C1-INH catabolism. While no overt differences were observed in peak circulating C1-INH, Serping1^{-/-} animals exhibited delayed time-to-threshold kinetics. Differences in peak expression were found to be derived from variation in dosing formulation, rather than driven by genotype (data not shown).

### Example 7—C1-INH Expression and Pharmacodynamics (FIG. 22)

[0414] Data comparing hC1-INH expression in different Serping1 genotypes indicated a potential effect of endogenous mC1-INH on hC1-INH dose response (FIG. 22A & FIG. 22B), however a clear relationship was not established. Circulating plasma hC1-INH had a clear and consistent negative correlation with plasma bradykinin (FIG. 22C) and tPA activity (FIG. 22D), indicating functional regulation of elements of the contact system and hemostasis.

### Example 8—I21 (SEQ ID NO: 22) Drives Dose-Dependent, Durable hC1-INH Antigen Levels in Plasma of HAE Model Mice (FIG. 23)

[0415] B6/SJL^{serping1-/-} male mice were injected with one of five doses of I21 (SEQ ID NO 22), ranging from 9.5×10¹¹ to 3.0×10¹³ vg/kg. (FIG. 23A) Plasma C1-INH levels as measured by ELISA as a function of time. Values are in units of IU/mL and presented as mean±SD. (FIG. 23B) Steady-state C1-INH antigen levels in B6/SJL^{serping-/-} male mice as a function of vector dose. All values were log₁₀ transformed and a linear fit was generated using regression analysis (R²=0.88). C1-INH activity as measured by C1-esterase inhibition exhibited a linear dose-response and correlated with antigen levels (data not shown).

### Example 9-I21 (SEQ ID NO: 22) Mediated Reduction in Bradykinin, the Primary Driver of Angioedemic Attack, in HAE Disease Model Mice (FIG. 24)

[0416] FIG. 24A) Individual and mean±SD plasma bradykinin levels in each dose cohort. With the exception of the lowest vector dose cohort, animals that received I21 vector displayed significant reductions in mean plasma bradykinin relative to excipient-treated mice. Statistical comparison relative to excipient was performed by one-way ANOVA with post-hoc Dunnett's multiple comparisons test (**, p<0.01; ***, p<0.001). FIG. 24B). Plasma C1-INH levels were inversely correlated with plasma bradykinin levels and exhibited a linear relationship with respect to C1-INH antigen (R²=0.81).

### Example 10—I21 (SEQ ID NO: 22) Mediated C1-INH Rescues C4 Levels in the Mouse Model of HAE (FIG. 25)

[0417] Plasma C4 was analyzed at study terminus by an automated capillary-based immunoassay system (Wes™, ProteinSimple). FIG. 25A) Individual and mean±SD relative C4 expression in each dose cohort. FIG. 25B) Individual relative plasma C4 values plotted relative to each animal's respective C1-INH antigen level at Week 31. All values were log₁₀ transformed and a linear fit was generated using regression analysis (R²=0.87). The level of C4 was also examined as a function of plasma C1-INH (FIG. 25C).

### Example 11—Toxicology Study

[0418] AAV-encapsidated I21 (SEQ ID NO: 22) toxicology was assessed in C57BL/6J male and female mice. Male mice were dosed with AAV-encapsidated I21 at 2.5×10¹² vg/kg, 5.0×10¹² vg/kg, or 1.0×10¹³. Female mice were dosed with AAV-encapsidated I21 at 1.0×10¹³ vg/kg, 5.0×10¹³ vg/kg, or 9.9×10¹³ vg/kg. All dosed mice survived to term (30 days) and no microscopic findings in a histopathological evaluation were considered to be directly related to administration of AAV-encapsidated 121. C1-INH levels in the dosed mice exceeded 100% of normal by >30 to 60 fold (FIG. 26A and FIG. 26B).

### Example 12—Non-Human Primate (NHP) Dose Study

[0419] The objectives of this NHP dose estimation study was to assess AAV-encapsidated I21 vector safety and to elucidate a range of doses to achieve therapeutic levels of human C1-INH to inform the starting clinical dose. Three ascending vector doses of 1.0×10¹³ vg/kg, 3.2×10¹³ vg/kg, and 1.0×10¹⁴ vg/kg were aimed to target 20%, 70%, and 200% of normal circulating C1-INH in both male and female cynomolgus macaques.

TABLE 11

| Group No. | | | | |
|---|---|---|---|---|
| 1 | Vehicle | 0 | 6 | 6 |
| 2 | AAV- | 1.0 × 10¹³ | 4 | 4 |
| | encapsidated I21 | (Low) | | |
| 3 | AAV- | 3.2 × 10¹³ (Mid) | 4 | 4 |
| | encapsidated I21 | | | |
| 4 | AAV- | 1.0 × 10¹⁴ | 3 | 3 |
| | encapsidated I21 | (High) | | |

[0420] Human C1-INH Antigen Levels in NHP Plasma: Human C1-INH was quantified using a LC-MS/MS method. Plasma-derived human C1-INH (Molecular Innovations, #HC1INH-1.0MG) was used to prepare standards that ranged from 10 μg/mL to 0.1 μg/mL and QC samples targeting 30 and 300 ug/mL following a 50-fold dilution. Samples were diluted up to 5-fold prior to quantification.

[0421] Activity of Human C1-INH in NHP Plasma: C1-INH activity was quantified using a modified version of the Technochrom C1-INH kit (Diapharma, 5345003), a chromogenic C1-esterase inhibitor assay in which C1-INH is titrated against an excess of C1-esterase and the residual C1-esterase activity is measured. Provided vials of C1-esterase and substrate were reconstituted with the indicated, on each vial, volume of nuclease-free water, and National Institute for Biological Standards and Control (NIBSC) concentrate (08/256) was reconstituted in cell culture grade water to obtain a stock concentration of 19.2 IU/mL (1920% Normal Activity). The provided Buffer B was placed in a water bath at 37° C. to allow equilibration to the appropriate temperature prior to use. In a 96-well tissue culture plate, samples were diluted 1:10 in provided Buffer A. A standard curve was prepared using NIBSC concentrate (08/256) in Buffer A, ranging from 200% Normal Activity to 17.3% Normal Activity for a total of 8 reference points, with the final point consisting of buffer alone (0% of normal C1-INH activity). A 1:6 dilution of substrate was prepared in Buffer B and QC samples were prepared consecutively in Cyno Normal Pooled Plasma and Buffer A to achieve 75% and 3-0% Normal Activity. 20 μL of Human C1-esterase was added to a fresh 96-well tissue culture plate. 20 μL of standard, QCs and samples were added to all wells containing human C1-esterase in duplicate and the plate was incubated at 37° C. for 5 minutes and 30 seconds, after which, 120 μL of diluted prewarmed substrate was added to each well and the plate was incubated for an additional 20 minutes at 37° C. Following the 20 minute incubation, the plate was immediately read every 54 seconds for 5 minutes on a SpectraMax i3x plate reader (Molecular Devices) set to 37° C. for optical density at 405 nm.

[0422] The SoftMax Pro software was used to plot standards using a Log-Log transformed fit and calculations were performed automatically. Reported results are the back-calculated dilutions obtained from interpolation using this standard curve and reported as percentage of normal C1-INH activity following normalization for % normal C1-INH activity obtained in pre-dose Day 1 plasma samples.

[0423] FIG. 27A and FIG. 27B illustrate the results of the dosing study looking at different timepoints. AAV-encapsidated I21 (SEQ ID NO: 22) generated a sustained increase in both hC1-INH antigen and activity. In addition, C1-INH expression spanned the therapeutic range.

[0424] FIG. 28A and FIG. 28B illustrates hC1-INH antigen level and peak percent normal C1-INH activity produced with different doses of AAV-encapsidated 121. Two-way ANOVA of log₁₀-trasnsformed data was performed for both analysis. Antigen and activity correlated well over all doses tested, regardless of sex. No statistical difference was observed in the expression between males and females.

### Example 13—In Vitro hC-INH Expression from Plasmids

[0425] Huh7 cells were transfected in vitro with different SERPINGA expression plasmids and hC1-NH antigen levels in supeatant were measured. The different expression plasmids contained the AAV expression cassettes as indicated in Table 12.

TABLE 12
List of plasmids along with their abbreviations:

| | | FIG. 29 |
|---|---|---|
| SEQ | | Abbreviated |
| ID | | Plasmid |
| NO | | Name |
| 22 | pAAV_ApoE_hAAT_HBB2m1_ | pAAV_ |
| | SERPING1co21_BGH228 | SERPING1_I21 |
| 28 | pSwap ApoE hAAT_HBB2m1_ | pSwap- |
| | SERPING1coI21 BGH228 | SERPING1_I21 |
| 34 | pSwap_2xApoE_hAAT_HBB2m1_ | 2xApoE 5' |
| | SERPING1co21_BGH228 | |
| 35 | pSwap_4xApoE_hAAT_HBB2m1_ | 4xApoE 5′ |
| | SERPING1co21_BGH228 | |
| 36 | pSwap_hAAT_HBB2m1_ | 2xApoE 3′ |
| | SERPING1co21_2xApoE_BGH228 | |
| 37 | pSwap_hAAT_HBB2m1_ | 4xApoE 3′ |
| | SERPING1co21_4xApoE_BGH228 | |
| 38 | pSwap_ApoE_hAAT_HBB2m1_ | hAAT enh 3′ |
| | SERPING1co21_hAATenh_BGH228 | |
| 39 | pSwap_ApoE_hAAT_HBB2m1_ | hAAT enh |
| | SERPING1co21_hAATenh(co1)_BGH228 | (co1) 3′ |
| 42 | pSwap_ApoE_hAAT_HBB2m1_ | WPRE |
| | SERPING1co21_WPRE_BGH228 | |
| 43 | pSwap_ApoE_hAAT_HBB2m1_ | WPRE(co1) |
| | SERPING1co21_WPREco1_BGH228 | |
| 40 | pSwap_ApoE_hAAT_HBB2m1_ | WPRE3 |
| | SERPING1co21_WPRE3_BGH228 | |
| 41 | pSwap_ApoE_hAAT_HBB2m1_ | WPRE3(co1) |
| | SERPING1co21_WPRE3co1_BGH228 | |
| 56 | pAAV_ApoE_hAAT_HBB2m1_ | (-ORFs) |
| | SERPING1co21_BGH228 (-ORFs) | |
| 44 | pSwap_ApoE_hAAT_HBB2m1(-ATG)_ | HBB2-ATG |
| | SERPING1co21_BGH228 | |
| 27 | pAAV_ApoE_hAAT_HBB2m1_ | (-RIDD) |
| | SERPING1coI21(-RIDD)_BGH228 | |
| 229 | pAAV_ApoE_hAAT_HBB2m1(-ATG)_ | (HBB2- |
| | SERPING1coI21(-RIDD)_BGH228 | ATG/-RIDD) |
| 57 | pSwap_ApoE_hAAT_ | SERPING1 5′UTR |
| | SERPING1co21(SERPING1 5′UTR)_BGH228 | |
| 61 | pSwap_ApoE_hAAT_(SERPING1 APRE) | SERPING1 APRE |
| | HBB2m1_SERPING1co21_BGH228 | |
| 60 | pSwap_ApoE_hAAT_SERPING1co21 | SERPING1 |
| | (SERPING1APRE/5′UTR) BGH228 | APRE & 5′UTR |
| 62 | pSwap_ApoE_hAAT_HBB2m1_ | SAA2 5′UTR |
| | SERPING1co21_BGH228 (SAA2 5′UTR) | |
| 63 | pSwap_ApoE_hAAT_HBB2m1_ | SAA2 3′ UTR |
| | SERPING1co21_BGH228 (SAA2 3′UTR) | |
| 64 | pSwap_ApoE_hAAT_HBB2m1_ | SAA2 5′&3′ UTR |
| | SERPING1co21_BGH228 (SAA2 5′&3′UTR) | |
| 65 | pSwap_ApoE_hAAT(APRE-SAA2)_ | SAA2 APRE |
| | HBB2m1_(SAA25′)SERPING1co21_BGH228 | & 5′UTR |
| 66 | pSwap_(2x ADRES)ApoE_hAAT_ | 2xADRES |
| | HBB2m1_SERPING1co21_BGH228 | |
| 67 | pSwap_ApoE_hAAT_HBB2m1_ | RIDD1x |
| | SERPING1co21(+RIDD1x)_BGH228 | |
| 68 | pSwap_ApoE_hAAT_HBB2m1_ | RIDD3x |
| | SERPING1co21(+RIDD3x)_BGH228 | |
| 69 | pSwap_ApoE_hAAT_HBB2m1_ | RIDD1xBlos |
| | SERPING1co21(+RIDD1xBlos)_BGH228 | |
| 45 | pSwap_ApoE_hAAT_SERPING1co21 | Intron 1-2, 2-3 |
| | (Intron 1-2, 2-3)_BGH228 | |
| 46 | pSwap_ApoE_hAAT_HBB2m1_ | Intron 2-3 |
| | SERPING1co21(Intron 2-3)_BGH228 | |
| 47 | pSwap_ApoE_hAAT_HBB2m1_ | Intron 3-4 |
| | SERPING1co21(Intron 3-4)_BGH228 | |
| 58 | pSwap_ApoE_hAAT_HBB2m1_ | Intron 2-3- |
| | SERPING1co21(Intron 2-3)_BGH228- | LINES/SINES |
| | SINES_LINES | |
| 227 | pSwap_ApoE_hAAT_HBB2m1_ | Intron |
| | SERPING1co21(Intron 2-3)_BGH228- | 2-3-LINES/ |
| | SINES_LINES-CpG | SINES(-CpG) |
| 59 | pSwap_ApoE_hAAT_HBB2m1_ | Intron 3-4- |
| | SERPING1co21(Intron 3-4)_BGH228- | LINES/SINES |
| | SINES_LINES | |
| 228 | pSwap_ApoE_hAAT_HBB2m1_ | Intron 3-4-LINES/ |
| | SERPING1co21(Intron 3-4)_BGH228- | SINES(-CpG) |
| | SINES_LINES-CpG | |

[0426] The results are shown in FIG. 29. Results are the average of biological replicates n=3. Error bars represent standard deviation. Nearly all plasmids demonstrated increased expression levels of secreted human C1-INH compared to a control plasmid having green fluorescent protein (GFP) driven by CAG (pCAG_GFP), indicating that these plasmids resulted in expression of the SERPING1 transgene product.

[0427] Huh7 cells were transfected in vitro with different SERPING1 expression plasmids containing SEQ ID NOs: 49, 50, 51, 52, 53, or 54; and C1-INH antigen levels in the supernatant were undetectable (data not shown).

### Example 14—SERPING1 Expression Plasmid with miR-142-3p Target Site

[0428] Huh7 cells were transfected in vitro with plasmid containing a nucleic acid of SEQ ID NO: 28 (pSwap-SERPING1_I21), SEQ ID NO: 55 (mir 142-3p), or control plasmid pCAG_GFP; and hC1-INH antigen secreted into the supernatant was assayed. The results are shown in FIG. 30. Results are the average of biological replicates n=3. Error bars represent standard deviation.

[0429] The miR-142-3p target site plasmid demonstrated increased expression levels of secreted human C1-INH compared to a green fluorescent protein (pCAG_GFP) control plasmid, indicating that it resulted in expression of the SERPING1 transgene product. In addition, the miR-142-3p plasmid yielded levels of human C1-INH relatively similar to those of pSwap-SERPING1_I21.

[0430] The instant invention is generally disclosed herein using affirmative language to describe the numerous embodiments of the instant invention. The instant invention also specifically includes embodiments in which particular subject matter is excluded, in full or in part, such as substances or materials, method steps and conditions, protocols, or procedures. For example, in certain embodiments of the instant invention, materials and/or method steps are excluded. Thus, even though the instant invention is generally not expressed herein in terms of what the instant invention does not include, aspects that are not expressly excluded in the instant invention are nevertheless disclosed herein.

The application's sequence listing, which the Patent Office published only in electronic form, follows.

SEQUENCE LISTING (269 sequences)

SEQ ID NO: 1 - DNA, 3352 bp, Artificial Sequence
  pAAV_ApoE_hAAT_HBB2m1_SERPING1_BGH228
ctgcgcgctcgctcgctcactgaggccgcccgggcaaagcccgggcggcctcagtgagcgagcgagcgcgcagagagggagtggccaactccatcactaggggttcctgcggcctagtaggctcagaggcacacaggagtttctgggctcaccctgcccccttccaacccctcagttcccatcctccagcagctgtttgtgtgctgcctctgaagtccacactgaacaaacttcagcctactcatgtccctaaaatgggcaaacattgcaagcagcaaacagcaaacacacagccctccctgcctgctgaccttggagctggggcagaggtcagagacctctctgggcccatgccacctccaacatccactcgaccccttggaatttcggtggagaggagcagaggttgtcctggcgtggtttaggtagtgtgagaggggtacccggggatcttgctaccagtggaacagccactaaggattctgcagtgagagcagagggccagctaagtggtactctcccagagactgtctgactcacgccaccccctccaccttggacacaggacgctgtggtttctgagccaggtacaatgactcctttcggtaagtgcagtggaagctgtacactgcccaggcaaagcgtccgggcagcgtaggcgggcgactcagatcccagccagtggacttagcccctgtttgctcctccgataactggggtgaccttggttaatattcaccagcagcctcccccgttgcccctctggatccactgcttaaatacggacgaggacagggccctgtctcctcagcttcaggcaccaccactgacctgggacagtgaatagatcctgagaacttcagggtgagtctatgggacccttgatgttttctttccccttcttttctatggttaagttcatgtcataggaaggggagaagtaacagggtacacatattgaccaaatcagggtaattttgcatttgtaattttaaaaaatgctttcttcttttaatatacttttttgtttatcttatttctaatactttccctaatctctttctttcagggcaataatgatacaatgtatcatgcctctttgcaccattctaaagaataacagtgataatttctgggttaaggcaatagcaatatttctgcatataaatatttctgcatataaattgtaactgatgtaagaggtttcatattgctaatagcagctacaatccagctaccattctgcttttattttctggttgggataaggctggattattctgagtccaagctaggcccttttgctaatcttgttcatacctcttatcttcctcccacagctcctgggcaacctgctggtctctctgctggcccatcactttggcaaagcacgcgtgccaccatggcctccaggctgaccctgctgaccctcctgctgctgctgctggctggggatagagcctcctcaaatccaaatgctaccagctccagctcccaggatccagagagtttgcaagacagaggcgaagggaaggtcgcaacaacagttatctccaagatgctattcgttgaacccatcctggaggtttccagcttgccgacaaccaactcaacaaccaattcagccaccaaaataacagctaataccactgatgaacccaccacacaacccaccacagagcccaccacccaacccaccatccaacccacccaaccaactacccagctcccaacagattctcctacccagcccactactgggtccttctgcccaggacctgttactctctgctctgacttggagagtcattcaacagaggccgtgttgggggatgctttggtagatttctccctgaagctctaccacgccttctcagcaatgaagaaggtggagaccaacatggccttttccccattcagcatcgccagcctccttacccaggtcctgctcggggctggggagaacaccaaaacaaacctggagagcatcctctcttaccccaaggacttcacctgtgtccaccaggccctgaagggcttcacgaccaaaggtgtcacctcagtctctcagattttccacagcccagacctggccataagggacacctttgtgaatgcctctcggaccctgtacagcagcagccccagagtcctaagcaacaacagtgacgccaacttggagctcatcaacacctgggtggccaagaacaccaacaacaagatcagccggctgctagacagtctgccctccgatacccgccttgtcctcctcaatgctatctacctgagtgccaagtggaagacaacatttgatcccaagaaaaccagaatggaaccctttcacttcaaaaactcagttataaaagtgcccatgatgaatagcaagaagtaccctgtggcccatttcattgaccaaactttgaaagccaaggtggggcagctgcagctctcccacaatctgagtttggtgatcctggtaccccagaacctgaaacatcgtcttgaagacatggaacaggctctcagcccttctgttttcaaggccatcatggagaaactggagatgtccaagttccagcccactctcctaacactaccccgcatcaaagtgacgaccagccaggatatgctctcaatcatggagaaattggaattcttcgatttttcttatgaccttaacctgtgtgggctgacagaggaccctgatcttcaggtttctgcgatgcagcaccagacagtgctggaactgacagagactggggtggaggcggctgcagcctccgccatctctgtggcccgcaccctgctggtctttgaagtgcagcagcccttcctcttcgtgctctgggaccagcagcacaagttccctgtcttcatggggcgagtatatgaccccagggcctgaagatctagagctgaattcctgcagccagggggatcagcctctactgtgccttctagttgccagccatctgttgtttgcccctcccccttgccttccttgaccctggaaggtgccactcccactgtcctttcctaataaaatgaggaaattgcatcacattgtctgagtaggtgtcattctattctggggggtggggtggggcaggacagcaagggggaggattgggaagacaatagcaggcatgctggggatgcagtgggctctatggcttctgaggcagaaagaaccagctggggctcgagatccactagggccgcaggaacccctagtgatggagttggccactccctctctgcgcgctcgctcgctcactgaggccgggcgaccaaaggtcgcccgacgcccgggctttgcccgggcggcctcagtgagcgagcgagcgcgcag

SEQ ID NO: 2 - DNA, 3340 bp, Artificial Sequence
  pAAV_ApoE_hAAT_HBB2m1_SP7.SERPING1_BGH228
ctgcgcgctcgctcgctcactgaggccgcccgggcaaagcccgggcggcctcagtgagcgagcgagcgcgcagagagggagtggccaactccatcactaggggttcctgcggcctagtaggctcagaggcacacaggagtttctgggctcaccctgcccccttccaacccctcagttcccatcctccagcagctgtttgtgtgctgcctctgaagtccacactgaacaaacttcagcctactcatgtccctaaaatgggcaaacattgcaagcagcaaacagcaaacacacagccctccctgcctgctgaccttggagctggggcagaggtcagagacctctctgggcccatgccacctccaacatccactcgaccccttggaatttcggtggagaggagcagaggttgtcctggcgtggtttaggtagtgtgagaggggtacccggggatcttgctaccagtggaacagccactaaggattctgcagtgagagcagagggccagctaagtggtactctcccagagactgtctgactcacgccaccccctccaccttggacacaggacgctgtggtttctgagccaggtacaatgactcctttcggtaagtgcagtggaagctgtacactgcccaggcaaagcgtccgggcagcgtaggcgggcgactcagatcccagccagtggacttagcccctgtttgctcctccgataactggggtgaccttggttaatattcaccagcagcctcccccgttgcccctctggatccactgcttaaatacggacgaggacagggccctgtctcctcagcttcaggcaccaccactgacctgggacagtgaatagatcctgagaacttcagggtgagtctatgggacccttgatgttttctttccccttcttttctatggttaagttcatgtcataggaaggggagaagtaacagggtacacatattgaccaaatcagggtaattttgcatttgtaattttaaaaaatgctttcttcttttaatatacttttttgtttatcttatttctaatactttccctaatctctttctttcagggcaataatgatacaatgtatcatgcctctttgcaccattctaaagaataacagtgataatttctgggttaaggcaatagcaatatttctgcatataaatatttctgcatataaattgtaactgatgtaagaggtttcatattgctaatagcagctacaatccagctaccattctgcttttattttctggttgggataaggctggattattctgagtccaagctaggcccttttgctaatcttgttcatacctcttatcttcctcccacagctcctgggcaacctgctggtctctctgctggcccatcactttggcaaagcacgcgtgccaccatggcctttctgtggctgctgtcctgctgggccctgctggggaccacctttggcaatccaaatgctaccagctccagctcccaggatccagagagtttgcaagacagaggcgaagggaaggtcgcaacaacagttatctccaagatgctattcgttgaacccatcctggaggtttccagcttgccgacaaccaactcaacaaccaattcagccaccaaaataacagctaataccactgatgaacccaccacacaacccaccacagagcccaccacccaacccaccatccaacccacccaaccaactacccagctcccaacagattctcctacccagcccactactgggtccttctgcccaggacctgttactctctgctctgacttggagagtcattcaacagaggccgtgttgggggatgctttggtagatttctccctgaagctctaccacgccttctcagcaatgaagaaggtggagaccaacatggccttttccccattcagcatcgccagcctccttacccaggtcctgctcggggctggggagaacaccaaaacaaacctggagagcatcctctcttaccccaaggacttcacctgtgtccaccaggccctgaagggcttcacgaccaaaggtgtcacctcagtctctcagattttccacagcccagacctggccataagggacacctttgtgaatgcctctcggaccctgtacagcagcagccccagagtcctaagcaacaacagtgacgccaacttggagctcatcaacacctgggtggccaagaacaccaacaacaagatcagccggctgctagacagtctgccctccgatacccgccttgtcctcctcaatgctatctacctgagtgccaagtggaagacaacatttgatcccaagaaaaccagaatggaaccctttcacttcaaaaactcagttataaaagtgcccatgatgaatagcaagaagtaccctgtggcccatttcattgaccaaactttgaaagccaaggtggggcagctgcagctctcccacaatctgagtttggtgatcctggtaccccagaacctgaaacatcgtcttgaagacatggaacaggctctcagcccttctgttttcaaggccatcatggagaaactggagatgtccaagttccagcccactctcctaacactaccccgcatcaaagtgacgaccagccaggatatgctctcaatcatggagaaattggaattcttcgatttttcttatgaccttaacctgtgtgggctgacagaggaccctgatcttcaggtttctgcgatgcagcaccagacagtgctggaactgacagagactggggtggaggcggctgcagcctccgccatctctgtggcccgcaccctgctggtctttgaagtgcagcagcccttcctcttcgtgctctgggaccagcagcacaagttccctgtcttcatggggcgagtatatgaccccagggcctgaagatctagagctgaattcctgcagccagggggatcagcctctactgtgccttctagttgccagccatctgttgtttgcccctcccccttgccttccttgaccctggaaggtgccactcccactgtcctttcctaataaaatgaggaaattgcatcacattgtctgagtaggtgtcattctattctggggggtggggtggggcaggacagcaagggggaggattgggaagacaatagcaggcatgctggggatgcagtgggctctatggcttctgaggcagaaagaaccagctggggctcgagatccactagggccgcaggaacccctagtgatggagttggccactccctctctgcgcgctcgctcgctcactgaggccgggcgaccaaaggtcgcccgacgcccgggctttgcccgggcggcctcagtgagcgagcgagcgcgcag

SEQ ID NO: 3 - DNA, 3340 bp, Artificial Sequence
  pAAV_ApoE_hAAT_HBB2m1_ALB.SERPING1_BGH228
ctgcgcgctcgctcgctcactgaggccgcccgggcaaagcccgggcggcctcagtgagcgagcgagcgcgcagagagggagtggccaactccatcactaggggttcctgcggcctagtaggctcagaggcacacaggagtttctgggctcaccctgcccccttccaacccctcagttcccatcctccagcagctgtttgtgtgctgcctctgaagtccacactgaacaaacttcagcctactcatgtccctaaaatgggcaaacattgcaagcagcaaacagcaaacacacagccctccctgcctgctgaccttggagctggggcagaggtcagagacctctctgggcccatgccacctccaacatccactcgaccccttggaatttcggtggagaggagcagaggttgtcctggcgtggtttaggtagtgtgagaggggtacccggggatcttgctaccagtggaacagccactaaggattctgcagtgagagcagagggccagctaagtggtactctcccagagactgtctgactcacgccaccccctccaccttggacacaggacgctgtggtttctgagccaggtacaatgactcctttcggtaagtgcagtggaagctgtacactgcccaggcaaagcgtccgggcagcgtaggcgggcgactcagatcccagccagtggacttagcccctgtttgctcctccgataactggggtgaccttggttaatattcaccagcagcctcccccgttgcccctctggatccactgcttaaatacggacgaggacagggccctgtctcctcagcttcaggcaccaccactgacctgggacagtgaatagatcctgagaacttcagggtgagtctatgggacccttgatgttttctttccccttcttttctatggttaagttcatgtcataggaaggggagaagtaacagggtacacatattgaccaaatcagggtaattttgcatttgtaattttaaaaaatgctttcttcttttaatatacttttttgtttatcttatttctaatactttccctaatctctttctttcagggcaataatgatacaatgtatcatgcctctttgcaccattctaaagaataacagtgataatttctgggttaaggcaatagcaatatttctgcatataaatatttctgcatataaattgtaactgatgtaagaggtttcatattgctaatagcagctacaatccagctaccattctgcttttattttctggttgggataaggctggattattctgagtccaagctaggcccttttgctaatcttgttcatacctcttatcttcctcccacagctcctgggcaacctgctggtctctctgctggcccatcactttggcaaagcacgcgtgccaccatgaagtgggtaacctttatttcccttctttttctctttagctcggcttattccaatccaaatgctaccagctccagctcccaggatccagagagtttgcaagacagaggcgaagggaaggtcgcaacaacagttatctccaagatgctattcgttgaacccatcctggaggtttccagcttgccgacaaccaactcaacaaccaattcagccaccaaaataacagctaataccactgatgaacccaccacacaacccaccacagagcccaccacccaacccaccatccaacccacccaaccaactacccagctcccaacagattctcctacccagcccactactgggtccttctgcccaggacctgttactctctgctctgacttggagagtcattcaacagaggccgtgttgggggatgctttggtagatttctccctgaagctctaccacgccttctcagcaatgaagaaggtggagaccaacatggccttttccccattcagcatcgccagcctccttacccaggtcctgctcggggctggggagaacaccaaaacaaacctggagagcatcctctcttaccccaaggacttcacctgtgtccaccaggccctgaagggcttcacgaccaaaggtgtcacctcagtctctcagattttccacagcccagacctggccataagggacacctttgtgaatgcctctcggaccctgtacagcagcagccccagagtcctaagcaacaacagtgacgccaacttggagctcatcaacacctgggtggccaagaacaccaacaacaagatcagccggctgctagacagtctgccctccgatacccgccttgtcctcctcaatgctatctacctgagtgccaagtggaagacaacatttgatcccaagaaaaccagaatggaaccctttcacttcaaaaactcagttataaaagtgcccatgatgaatagcaagaagtaccctgtggcccatttcattgaccaaactttgaaagccaaggtggggcagctgcagctctcccacaatctgagtttggtgatcctggtaccccagaacctgaaacatcgtcttgaagacatggaacaggctctcagcccttctgttttcaaggccatcatggagaaactggagatgtccaagttccagcccactctcctaacactaccccgcatcaaagtgacgaccagccaggatatgctctcaatcatggagaaattggaattcttcgatttttcttatgaccttaacctgtgtgggctgacagaggaccctgatcttcaggtttctgcgatgcagcaccagacagtgctggaactgacagagactggggtggaggcggctgcagcctccgccatctctgtggcccgcaccctgctggtctttgaagtgcagcagcccttcctcttcgtgctctgggaccagcagcacaagttccctgtcttcatggggcgagtatatgaccccagggcctgaagatctagagctgaattcctgcagccagggggatcagcctctactgtgccttctagttgccagccatctgttgtttgcccctcccccttgccttccttgaccctggaaggtgccactcccactgtcctttcctaataaaatgaggaaattgcatcacattgtctgagtaggtgtcattctattctggggggtggggtggggcaggacagcaagggggaggattgggaagacaatagcaggcatgctggggatgcagtgggctctatggcttctgaggcagaaagaaccagctggggctcgagatccactagggccgcaggaacccctagtgatggagttggccactccctctctgcgcgctcgctcgctcactgaggccgggcgaccaaaggtcgcccgacgcccgggctttgcccgggcggcctcagtgagcgagcgagcgcgcag

SEQ ID NO: 4 - DNA, 3340 bp, Artificial Sequence
  pAAV_ApoE_hAAT_HBB2m1_ORM1.SERPING1_BGH228
ctgcgcgctcgctcgctcactgaggccgcccgggcaaagcccgggcggcctcagtgagcgagcgagcgcgcagagagggagtggccaactccatcactaggggttcctgcggcctagtaggctcagaggcacacaggagtttctgggctcaccctgcccccttccaacccctcagttcccatcctccagcagctgtttgtgtgctgcctctgaagtccacactgaacaaacttcagcctactcatgtccctaaaatgggcaaacattgcaagcagcaaacagcaaacacacagccctccctgcctgctgaccttggagctggggcagaggtcagagacctctctgggcccatgccacctccaacatccactcgaccccttggaatttcggtggagaggagcagaggttgtcctggcgtggtttaggtagtgtgagaggggtacccggggatcttgctaccagtggaacagccactaaggattctgcagtgagagcagagggccagctaagtggtactctcccagagactgtctgactcacgccaccccctccaccttggacacaggacgctgtggtttctgagccaggtacaatgactcctttcggtaagtgcagtggaagctgtacactgcccaggcaaagcgtccgggcagcgtaggcgggcgactcagatcccagccagtggacttagcccctgtttgctcctccgataactggggtgaccttggttaatattcaccagcagcctcccccgttgcccctctggatccactgcttaaatacggacgaggacagggccctgtctcctcagcttcaggcaccaccactgacctgggacagtgaatagatcctgagaacttcagggtgagtctatgggacccttgatgttttctttccccttcttttctatggttaagttcatgtcataggaaggggagaagtaacagggtacacatattgaccaaatcagggtaattttgcatttgtaattttaaaaaatgctttcttcttttaatatacttttttgtttatcttatttctaatactttccctaatctctttctttcagggcaataatgatacaatgtatcatgcctctttgcaccattctaaagaataacagtgataatttctgggttaaggcaatagcaatatttctgcatataaatatttctgcatataaattgtaactgatgtaagaggtttcatattgctaatagcagctacaatccagctaccattctgcttttattttctggttgggataaggctggattattctgagtccaagctaggcccttttgctaatcttgttcatacctcttatcttcctcccacagctcctgggcaacctgctggtctctctgctggcccatcactttggcaaagcacgcgtgccaccatggcgctgtcctgggttcttacagtcctgagcctcctacctctgctggaagccaatccaaatgctaccagctccagctcccaggatccagagagtttgcaagacagaggcgaagggaaggtcgcaacaacagttatctccaagatgctattcgttgaacccatcctggaggtttccagcttgccgacaaccaactcaacaaccaattcagccaccaaaataacagctaataccactgatgaacccaccacacaacccaccacagagcccaccacccaacccaccatccaacccacccaaccaactacccagctcccaacagattctcctacccagcccactactgggtccttctgcccaggacctgttactctctgctctgacttggagagtcattcaacagaggccgtgttgggggatgctttggtagatttctccctgaagctctaccacgccttctcagcaatgaagaaggtggagaccaacatggccttttccccattcagcatcgccagcctccttacccaggtcctgctcggggctggggagaacaccaaaacaaacctggagagcatcctctcttaccccaaggacttcacctgtgtccaccaggccctgaagggcttcacgaccaaaggtgtcacctcagtctctcagattttccacagcccagacctggccataagggacacctttgtgaatgcctctcggaccctgtacagcagcagccccagagtcctaagcaacaacagtgacgccaacttggagctcatcaacacctgggtggccaagaacaccaacaacaagatcagccggctgctagacagtctgccctccgatacccgccttgtcctcctcaatgctatctacctgagtgccaagtggaagacaacatttgatcccaagaaaaccagaatggaaccctttcacttcaaaaactcagttataaaagtgcccatgatgaatagcaagaagtaccctgtggcccatttcattgaccaaactttgaaagccaaggtggggcagctgcagctctcccacaatctgagtttggtgatcctggtaccccagaacctgaaacatcgtcttgaagacatggaacaggctctcagcccttctgttttcaaggccatcatggagaaactggagatgtccaagttccagcccactctcctaacactaccccgcatcaaagtgacgaccagccaggatatgctctcaatcatggagaaattggaattcttcgatttttcttatgaccttaacctgtgtgggctgacagaggaccctgatcttcaggtttctgcgatgcagcaccagacagtgctggaactgacagagactggggtggaggcggctgcagcctccgccatctctgtggcccgcaccctgctggtctttgaagtgcagcagcccttcctcttcgtgctctgggaccagcagcacaagttccctgtcttcatggggcgagtatatgaccccagggcctgaagatctagagctgaattcctgcagccagggggatcagcctctactgtgccttctagttgccagccatctgttgtttgcccctcccccttgccttccttgaccctggaaggtgccactcccactgtcctttcctaataaaatgaggaaattgcatcacattgtctgagtaggtgtcattctattctggggggtggggtggggcaggacagcaagggggaggattgggaagacaatagcaggcatgctggggatgcagtgggctctatggcttctgaggcagaaagaaccagctggggctcgagatccactagggccgcaggaacccctagtgatggagttggccactccctctctgcgcgctcgctcgctcactgaggccgggcgaccaaaggtcgcccgacgcccgggctttgcccgggcggcctcagtgagcgagcgagcgcgcag

SEQ ID NO: 5 - DNA, 3343 bp, Artificial Sequence
  pAAV_ApoE_hAAT_HBB2m1_TF.SERPING1_BGH228
ctgcgcgctcgctcgctcactgaggccgcccgggcaaagcccgggcggcctcagtgagcgagcgagcgcgcagagagggagtggccaactccatcactaggggttcctgcggcctagtaggctcagaggcacacaggagtttctgggctcaccctgcccccttccaacccctcagttcccatcctccagcagctgtttgtgtgctgcctctgaagtccacactgaacaaacttcagcctactcatgtccctaaaatgggcaaacattgcaagcagcaaacagcaaacacacagccctccctgcctgctgaccttggagctggggcagaggtcagagacctctctgggcccatgccacctccaacatccactcgaccccttggaatttcggtggagaggagcagaggttgtcctggcgtggtttaggtagtgtgagaggggtacccggggatcttgctaccagtggaacagccactaaggattctgcagtgagagcagagggccagctaagtggtactctcccagagactgtctgactcacgccaccccctccaccttggacacaggacgctgtggtttctgagccaggtacaatgactcctttcggtaagtgcagtggaagctgtacactgcccaggcaaagcgtccgggcagcgtaggcgggcgactcagatcccagccagtggacttagcccctgtttgctcctccgataactggggtgaccttggttaatattcaccagcagcctcccccgttgcccctctggatccactgcttaaatacggacgaggacagggccctgtctcctcagcttcaggcaccaccactgacctgggacagtgaatagatcctgagaacttcagggtgagtctatgggacccttgatgttttctttccccttcttttctatggttaagttcatgtcataggaaggggagaagtaacagggtacacatattgaccaaatcagggtaattttgcatttgtaattttaaaaaatgctttcttcttttaatatacttttttgtttatcttatttctaatactttccctaatctctttctttcagggcaataatgatacaatgtatcatgcctctttgcaccattctaaagaataacagtgataatttctgggttaaggcaatagcaatatttctgcatataaatatttctgcatataaattgtaactgatgtaagaggtttcatattgctaatagcagctacaatccagctaccattctgcttttattttctggttgggataaggctggattattctgagtccaagctaggcccttttgctaatcttgttcatacctcttatcttcctcccacagctcctgggcaacctgctggtctctctgctggcccatcactttggcaaagcacgcgtgccaccatgaggctcgccgtgggagccctgctggtctgcgccgtcctggggctgtgtctggctaatccaaatgctaccagctccagctcccaggatccagagagtttgcaagacagaggcgaagggaaggtcgcaacaacagttatctccaagatgctattcgttgaacccatcctggaggtttccagcttgccgacaaccaactcaacaaccaattcagccaccaaaataacagctaataccactgatgaacccaccacacaacccaccacagagcccaccacccaacccaccatccaacccacccaaccaactacccagctcccaacagattctcctacccagcccactactgggtccttctgcccaggacctgttactctctgctctgacttggagagtcattcaacagaggccgtgttgggggatgctttggtagatttctccctgaagctctaccacgccttctcagcaatgaagaaggtggagaccaacatggccttttccccattcagcatcgccagcctccttacccaggtcctgctcggggctggggagaacaccaaaacaaacctggagagcatcctctcttaccccaaggacttcacctgtgtccaccaggccctgaagggcttcacgaccaaaggtgtcacctcagtctctcagattttccacagcccagacctggccataagggacacctttgtgaatgcctctcggaccctgtacagcagcagccccagagtcctaagcaacaacagtgacgccaacttggagctcatcaacacctgggtggccaagaacaccaacaacaagatcagccggctgctagacagtctgccctccgatacccgccttgtcctcctcaatgctatctacctgagtgccaagtggaagacaacatttgatcccaagaaaaccagaatggaaccctttcacttcaaaaactcagttataaaagtgcccatgatgaatagcaagaagtaccctgtggcccatttcattgaccaaactttgaaagccaaggtggggcagctgcagctctcccacaatctgagtttggtgatcctggtaccccagaacctgaaacatcgtcttgaagacatggaacaggctctcagcccttctgttttcaaggccatcatggagaaactggagatgtccaagttccagcccactctcctaacactaccccgcatcaaagtgacgaccagccaggatatgctctcaatcatggagaaattggaattcttcgatttttcttatgaccttaacctgtgtgggctgacagaggaccctgatcttcaggtttctgcgatgcagcaccagacagtgctggaactgacagagactggggtggaggcggctgcagcctccgccatctctgtggcccgcaccctgctggtctttgaagtgcagcagcccttcctcttcgtgctctgggaccagcagcacaagttccctgtcttcatggggcgagtatatgaccccagggcctgaagatctagagctgaattcctgcagccagggggatcagcctctactgtgccttctagttgccagccatctgttgtttgcccctcccccttgccttccttgaccctggaaggtgccactcccactgtcctttcctaataaaatgaggaaattgcatcacattgtctgagtaggtgtcattctattctggggggtggggtggggcaggacagcaagggggaggattgggaagacaatagcaggcatgctggggatgcagtgggctctatggcttctgaggcagaaagaaccagctggggctcgagatccactagggccgcaggaacccctagtgatggagttggccactccctctctgcgcgctcgctcgctcactgaggccgggcgaccaaaggtcgcccgacgcccgggctttgcccgggcggcctcagtgagcgagcgagcgcgcag

SEQ ID NO: 6 - DNA, 3343 bp, Artificial Sequence
  pAAV_ApoE_hAAT_HBB2m1_AMBP.SERPING1_BGH228
ctgcgcgctcgctcgctcactgaggccgcccgggcaaagcccgggcggcctcagtgagcgagcgagcgcgcagagagggagtggccaactccatcactaggggttcctgcggcctagtaggctcagaggcacacaggagtttctgggctcaccctgcccccttccaacccctcagttcccatcctccagcagctgtttgtgtgctgcctctgaagtccacactgaacaaacttcagcctactcatgtccctaaaatgggcaaacattgcaagcagcaaacagcaaacacacagccctccctgcctgctgaccttggagctggggcagaggtcagagacctctctgggcccatgccacctccaacatccactcgaccccttggaatttcggtggagaggagcagaggttgtcctggcgtggtttaggtagtgtgagaggggtacccggggatcttgctaccagtggaacagccactaaggattctgcagtgagagcagagggccagctaagtggtactctcccagagactgtctgactcacgccaccccctccaccttggacacaggacgctgtggtttctgagccaggtacaatgactcctttcggtaagtgcagtggaagctgtacactgcccaggcaaagcgtccgggcagcgtaggcgggcgactcagatcccagccagtggacttagcccctgtttgctcctccgataactggggtgaccttggttaatattcaccagcagcctcccccgttgcccctctggatccactgcttaaatacggacgaggacagggccctgtctcctcagcttcaggcaccaccactgacctgggacagtgaatagatcctgagaacttcagggtgagtctatgggacccttgatgttttctttccccttcttttctatggttaagttcatgtcataggaaggggagaagtaacagggtacacatattgaccaaatcagggtaattttgcatttgtaattttaaaaaatgctttcttcttttaatatacttttttgtttatcttatttctaatactttccctaatctctttctttcagggcaataatgatacaatgtatcatgcctctttgcaccattctaaagaataacagtgataatttctgggttaaggcaatagcaatatttctgcatataaatatttctgcatataaattgtaactgatgtaagaggtttcatattgctaatagcagctacaatccagctaccattctgcttttattttctggttgggataaggctggattattctgagtccaagctaggcccttttgctaatcttgttcatacctcttatcttcctcccacagctcctgggcaacctgctggtctctctgctggcccatcactttggcaaagcacgcgtgccaccatgaggagcctcggggccctgctcttgctgctgagcgcctgcctggcggtgagcgctaatccaaatgctaccagctccagctcccaggatccagagagtttgcaagacagaggcgaagggaaggtcgcaacaacagttatctccaagatgctattcgttgaacccatcctggaggtttccagcttgccgacaaccaactcaacaaccaattcagccaccaaaataacagctaataccactgatgaacccaccacacaacccaccacagagcccaccacccaacccaccatccaacccacccaaccaactacccagctcccaacagattctcctacccagcccactactgggtccttctgcccaggacctgttactctctgctctgacttggagagtcattcaacagaggccgtgttgggggatgctttggtagatttctccctgaagctctaccacgccttctcagcaatgaagaaggtggagaccaacatggccttttccccattcagcatcgccagcctccttacccaggtcctgctcggggctggggagaacaccaaaacaaacctggagagcatcctctcttaccccaaggacttcacctgtgtccaccaggccctgaagggcttcacgaccaaaggtgtcacctcagtctctcagattttccacagcccagacctggccataagggacacctttgtgaatgcctctcggaccctgtacagcagcagccccagagtcctaagcaacaacagtgacgccaacttggagctcatcaacacctgggtggccaagaacaccaacaacaagatcagccggctgctagacagtctgccctccgatacccgccttgtcctcctcaatgctatctacctgagtgccaagtggaagacaacatttgatcccaagaaaaccagaatggaaccctttcacttcaaaaactcagttataaaagtgcccatgatgaatagcaagaagtaccctgtggcccatttcattgaccaaactttgaaagccaaggtggggcagctgcagctctcccacaatctgagtttggtgatcctggtaccccagaacctgaaacatcgtcttgaagacatggaacaggctctcagcccttctgttttcaaggccatcatggagaaactggagatgtccaagttccagcccactctcctaacactaccccgcatcaaagtgacgaccagccaggatatgctctcaatcatggagaaattggaattcttcgatttttcttatgaccttaacctgtgtgggctgacagaggaccctgatcttcaggtttctgcgatgcagcaccagacagtgctggaactgacagagactggggtggaggcggctgcagcctccgccatctctgtggcccgcaccctgctggtctttgaagtgcagcagcccttcctcttcgtgctctgggaccagcagcacaagttccctgtcttcatggggcgagtatatgaccccagggcctgaagatctagagctgaattcctgcagccagggggatcagcctctactgtgccttctagttgccagccatctgttgtttgcccctcccccttgccttccttgaccctggaaggtgccactcccactgtcctttcctaataaaatgaggaaattgcatcacattgtctgagtaggtgtcattctattctggggggtggggtggggcaggacagcaagggggaggattgggaagacaatagcaggcatgctggggatgcagtgggctctatggcttctgaggcagaaagaaccagctggggctcgagatccactagggccgcaggaacccctagtgatggagttggccactccctctctgcgcgctcgctcgctcactgaggccgggcgaccaaaggtcgcccgacgcccgggctttgcccgggcggcctcagtgagcgagcgagcgcgcag

SEQ ID NO: 7 - DNA, 3370 bp, Artificial Sequence
  pAAV_ApoE_hAAT_HBB2m1_LAMP1.SERPING1_BGH228
ctgcgcgctcgctcgctcactgaggccgcccgggcaaagcccgggcggcctcagtgagcgagcgagcgcgcagagagggagtggccaactccatcactaggggttcctgcggcctagtaggctcagaggcacacaggagtttctgggctcaccctgcccccttccaacccctcagttcccatcctccagcagctgtttgtgtgctgcctctgaagtccacactgaacaaacttcagcctactcatgtccctaaaatgggcaaacattgcaagcagcaaacagcaaacacacagccctccctgcctgctgaccttggagctggggcagaggtcagagacctctctgggcccatgccacctccaacatccactcgaccccttggaatttcggtggagaggagcagaggttgtcctggcgtggtttaggtagtgtgagaggggtacccggggatcttgctaccagtggaacagccactaaggattctgcagtgagagcagagggccagctaagtggtactctcccagagactgtctgactcacgccaccccctccaccttggacacaggacgctgtggtttctgagccaggtacaatgactcctttcggtaagtgcagtggaagctgtacactgcccaggcaaagcgtccgggcagcgtaggcgggcgactcagatcccagccagtggacttagcccctgtttgctcctccgataactggggtgaccttggttaatattcaccagcagcctcccccgttgcccctctggatccactgcttaaatacggacgaggacagggccctgtctcctcagcttcaggcaccaccactgacctgggacagtgaatagatcctgagaacttcagggtgagtctatgggacccttgatgttttctttccccttcttttctatggttaagttcatgtcataggaaggggagaagtaacagggtacacatattgaccaaatcagggtaattttgcatttgtaattttaaaaaatgctttcttcttttaatatacttttttgtttatcttatttctaatactttccctaatctctttctttcagggcaataatgatacaatgtatcatgcctctttgcaccattctaaagaataacagtgataatttctgggttaaggcaatagcaatatttctgcatataaatatttctgcatataaattgtaactgatgtaagaggtttcatattgctaatagcagctacaatccagctaccattctgcttttattttctggttgggataaggctggattattctgagtccaagctaggcccttttgctaatcttgttcatacctcttatcttcctcccacagctcctgggcaacctgctggtctctctgctggcccatcactttggcaaagcacgcgtgccaccatggcggcccccggcagcgcccggcgacccctgctgctgctactgctgttgctgctgctcggcctcatgcattgtgcgtcagcaaatccaaatgctaccagctccagctcccaggatccagagagtttgcaagacagaggcgaagggaaggtcgcaacaacagttatctccaagatgctattcgttgaacccatcctggaggtttccagcttgccgacaaccaactcaacaaccaattcagccaccaaaataacagctaataccactgatgaacccaccacacaacccaccacagagcccaccacccaacccaccatccaacccacccaaccaactacccagctcccaacagattctcctacccagcccactactgggtccttctgcccaggacctgttactctctgctctgacttggagagtcattcaacagaggccgtgttgggggatgctttggtagatttctccctgaagctctaccacgccttctcagcaatgaagaaggtggagaccaacatggccttttccccattcagcatcgccagcctccttacccaggtcctgctcggggctggggagaacaccaaaacaaacctggagagcatcctctcttaccccaaggacttcacctgtgtccaccaggccctgaagggcttcacgaccaaaggtgtcacctcagtctctcagattttccacagcccagacctggccataagggacacctttgtgaatgcctctcggaccctgtacagcagcagccccagagtcctaagcaacaacagtgacgccaacttggagctcatcaacacctgggtggccaagaacaccaacaacaagatcagccggctgctagacagtctgccctccgatacccgccttgtcctcctcaatgctatctacctgagtgccaagtggaagacaacatttgatcccaagaaaaccagaatggaaccctttcacttcaaaaactcagttataaaagtgcccatgatgaatagcaagaagtaccctgtggcccatttcattgaccaaactttgaaagccaaggtggggcagctgcagctctcccacaatctgagtttggtgatcctggtaccccagaacctgaaacatcgtcttgaagacatggaacaggctctcagcccttctgttttcaaggccatcatggagaaactggagatgtccaagttccagcccactctcctaacactaccccgcatcaaagtgacgaccagccaggatatgctctcaatcatggagaaattggaattcttcgatttttcttatgaccttaacctgtgtgggctgacagaggaccctgatcttcaggtttctgcgatgcagcaccagacagtgctggaactgacagagactggggtggaggcggctgcagcctccgccatctctgtggcccgcaccctgctggtctttgaagtgcagcagcccttcctcttcgtgctctgggaccagcagcacaagttccctgtcttcatggggcgagtatatgaccccagggcctgaagatctagagctgaattcctgcagccagggggatcagcctctactgtgccttctagttgccagccatctgttgtttgcccctcccccttgccttccttgaccctggaaggtgccactcccactgtcctttcctaataaaatgaggaaattgcatcacattgtctgagtaggtgtcattctattctggggggtggggtggggcaggacagcaagggggaggattgggaagacaatagcaggcatgctggggatgcagtgggctctatggcttctgaggcagaaagaaccagctggggctcgagatccactagggccgcaggaacccctagtgatggagttggccactccctctctgcgcgctcgctcgctcactgaggccgggcgaccaaaggtcgcccgacgcccgggctttgcccgggcggcctcagtgagcgagcgagcgcgcag

SEQ ID NO: 8 - DNA, 3382 bp, Artificial Sequence
  pAAV_ApoE_hAAT_HBB2m1_BTN2A2.SERPING1_BGH228
ctgcgcgctcgctcgctcactgaggccgcccgggcaaagcccgggcggcctcagtgagcgagcgagcgcgcagagagggagtggccaactccatcactaggggttcctgcggcctagtaggctcagaggcacacaggagtttctgggctcaccctgcccccttccaacccctcagttcccatcctccagcagctgtttgtgtgctgcctctgaagtccacactgaacaaacttcagcctactcatgtccctaaaatgggcaaacattgcaagcagcaaacagcaaacacacagccctccctgcctgctgaccttggagctggggcagaggtcagagacctctctgggcccatgccacctccaacatccactcgaccccttggaatttcggtggagaggagcagaggttgtcctggcgtggtttaggtagtgtgagaggggtacccggggatcttgctaccagtggaacagccactaaggattctgcagtgagagcagagggccagctaagtggtactctcccagagactgtctgactcacgccaccccctccaccttggacacaggacgctgtggtttctgagccaggtacaatgactcctttcggtaagtgcagtggaagctgtacactgcccaggcaaagcgtccgggcagcgtaggcgggcgactcagatcccagccagtggacttagcccctgtttgctcctccgataactggggtgaccttggttaatattcaccagcagcctcccccgttgcccctctggatccactgcttaaatacggacgaggacagggccctgtctcctcagcttcaggcaccaccactgacctgggacagtgaatagatcctgagaacttcagggtgagtctatgggacccttgatgttttctttccccttcttttctatggttaagttcatgtcataggaaggggagaagtaacagggtacacatattgaccaaatcagggtaattttgcatttgtaattttaaaaaatgctttcttcttttaatatacttttttgtttatcttatttctaatactttccctaatctctttctttcagggcaataatgatacaatgtatcatgcctctttgcaccattctaaagaataacagtgataatttctgggttaaggcaatagcaatatttctgcatataaatatttctgcatataaattgtaactgatgtaagaggtttcatattgctaatagcagctacaatccagctaccattctgcttttattttctggttgggataaggctggattattctgagtccaagctaggcccttttgctaatcttgttcatacctcttatcttcctcccacagctcctgggcaacctgctggtctctctgctggcccatcactttggcaaagcacgcgtgccaccatggaaccagctgctgctctgcacttctccctgccagcctccctcctcctcctcctgctcctcctccttctcagcctgtgtgcactggtctcagccaatccaaatgctaccagctccagctcccaggatccagagagtttgcaagacagaggcgaagggaaggtcgcaacaacagttatctccaagatgctattcgttgaacccatcctggaggtttccagcttgccgacaaccaactcaacaaccaattcagccaccaaaataacagctaataccactgatgaacccaccacacaacccaccacagagcccaccacccaacccaccatccaacccacccaaccaactacccagctcccaacagattctcctacccagcccactactgggtccttctgcccaggacctgttactctctgctctgacttggagagtcattcaacagaggccgtgttgggggatgctttggtagatttctccctgaagctctaccacgccttctcagcaatgaagaaggtggagaccaacatggccttttccccattcagcatcgccagcctccttacccaggtcctgctcggggctggggagaacaccaaaacaaacctggagagcatcctctcttaccccaaggacttcacctgtgtccaccaggccctgaagggcttcacgaccaaaggtgtcacctcagtctctcagattttccacagcccagacctggccataagggacacctttgtgaatgcctctcggaccctgtacagcagcagccccagagtcctaagcaacaacagtgacgccaacttggagctcatcaacacctgggtggccaagaacaccaacaacaagatcagccggctgctagacagtctgccctccgatacccgccttgtcctcctcaatgctatctacctgagtgccaagtggaagacaacatttgatcccaagaaaaccagaatggaaccctttcacttcaaaaactcagttataaaagtgcccatgatgaatagcaagaagtaccctgtggcccatttcattgaccaaactttgaaagccaaggtggggcagctgcagctctcccacaatctgagtttggtgatcctggtaccccagaacctgaaacatcgtcttgaagacatggaacaggctctcagcccttctgttttcaaggccatcatggagaaactggagatgtccaagttccagcccactctcctaacactaccccgcatcaaagtgacgaccagccaggatatgctctcaatcatggagaaattggaattcttcgatttttcttatgaccttaacctgtgtgggctgacagaggaccctgatcttcaggtttctgcgatgcagcaccagacagtgctggaactgacagagactggggtggaggcggctgcagcctccgccatctctgtggcccgcaccctgctggtctttgaagtgcagcagcccttcctcttcgtgctctgggaccagcagcacaagttccctgtcttcatggggcgagtatatgaccccagggcctgaagatctagagctgaattcctgcagccagggggatcagcctctactgtgccttctagttgccagccatctgttgtttgcccctcccccttgccttccttgaccctggaaggtgccactcccactgtcctttcctaataaaatgaggaaattgcatcacattgtctgagtaggtgtcattctattctggggggtggggtggggcaggacagcaagggggaggattgggaagacaatagcaggcatgctggggatgcagtgggctctatggcttctgaggcagaaagaaccagctggggctcgagatccactagggccgcaggaacccctagtgatggagttggccactccctctctgcgcgctcgctcgctcactgaggccgggcgaccaaaggtcgcccgacgcccgggctttgcccgggcggcctcagtgagcgagcgagcgcgcag

SEQ ID NO: 9 - DNA, 3337 bp, Artificial Sequence
  pAAV_ApoE_hAAT_HBB2m1_CD300.SERPING1_BGH228
ctgcgcgctcgctcgctcactgaggccgcccgggcaaagcccgggcggcctcagtgagcgagcgagcgcgcagagagggagtggccaactccatcactaggggttcctgcggcctagtaggctcagaggcacacaggagtttctgggctcaccctgcccccttccaacccctcagttcccatcctccagcagctgtttgtgtgctgcctctgaagtccacactgaacaaacttcagcctactcatgtccctaaaatgggcaaacattgcaagcagcaaacagcaaacacacagccctccctgcctgctgaccttggagctggggcagaggtcagagacctctctgggcccatgccacctccaacatccactcgaccccttggaatttcggtggagaggagcagaggttgtcctggcgtggtttaggtagtgtgagaggggtacccggggatcttgctaccagtggaacagccactaaggattctgcagtgagagcagagggccagctaagtggtactctcccagagactgtctgactcacgccaccccctccaccttggacacaggacgctgtggtttctgagccaggtacaatgactcctttcggtaagtgcagtggaagctgtacactgcccaggcaaagcgtccgggcagcgtaggcgggcgactcagatcccagccagtggacttagcccctgtttgctcctccgataactggggtgaccttggttaatattcaccagcagcctcccccgttgcccctctggatccactgcttaaatacggacgaggacagggccctgtctcctcagcttcaggcaccaccactgacctgggacagtgaatagatcctgagaacttcagggtgagtctatgggacccttgatgttttctttccccttcttttctatggttaagttcatgtcataggaaggggagaagtaacagggtacacatattgaccaaatcagggtaattttgcatttgtaattttaaaaaatgctttcttcttttaatatacttttttgtttatcttatttctaatactttccctaatctctttctttcagggcaataatgatacaatgtatcatgcctctttgcaccattctaaagaataacagtgataatttctgggttaaggcaatagcaatatttctgcatataaatatttctgcatataaattgtaactgatgtaagaggtttcatattgctaatagcagctacaatccagctaccattctgcttttattttctggttgggataaggctggattattctgagtccaagctaggcccttttgctaatcttgttcatacctcttatcttcctcccacagctcctgggcaacctgctggtctctctgctggcccatcactttggcaaagcacgcgtgccaccatgtggctgccttgggctctgttgcttctctgggtcccaggatgttttgctaatccaaatgctaccagctccagctcccaggatccagagagtttgcaagacagaggcgaagggaaggtcgcaacaacagttatctccaagatgctattcgttgaacccatcctggaggtttccagcttgccgacaaccaactcaacaaccaattcagccaccaaaataacagctaataccactgatgaacccaccacacaacccaccacagagcccaccacccaacccaccatccaacccacccaaccaactacccagctcccaacagattctcctacccagcccactactgggtccttctgcccaggacctgttactctctgctctgacttggagagtcattcaacagaggccgtgttgggggatgctttggtagatttctccctgaagctctaccacgccttctcagcaatgaagaaggtggagaccaacatggccttttccccattcagcatcgccagcctccttacccaggtcctgctcggggctggggagaacaccaaaacaaacctggagagcatcctctcttaccccaaggacttcacctgtgtccaccaggccctgaagggcttcacgaccaaaggtgtcacctcagtctctcagattttccacagcccagacctggccataagggacacctttgtgaatgcctctcggaccctgtacagcagcagccccagagtcctaagcaacaacagtgacgccaacttggagctcatcaacacctgggtggccaagaacaccaacaacaagatcagccggctgctagacagtctgccctccgatacccgccttgtcctcctcaatgctatctacctgagtgccaagtggaagacaacatttgatcccaagaaaaccagaatggaaccctttcacttcaaaaactcagttataaaagtgcccatgatgaatagcaagaagtaccctgtggcccatttcattgaccaaactttgaaagccaaggtggggcagctgcagctctcccacaatctgagtttggtgatcctggtaccccagaacctgaaacatcgtcttgaagacatggaacaggctctcagcccttctgttttcaaggccatcatggagaaactggagatgtccaagttccagcccactctcctaacactaccccgcatcaaagtgacgaccagccaggatatgctctcaatcatggagaaattggaattcttcgatttttcttatgaccttaacctgtgtgggctgacagaggaccctgatcttcaggtttctgcgatgcagcaccagacagtgctggaactgacagagactggggtggaggcggctgcagcctccgccatctctgtggcccgcaccctgctggtctttgaagtgcagcagcccttcctcttcgtgctctgggaccagcagcacaagttccctgtcttcatggggcgagtatatgaccccagggcctgaagatctagagctgaattcctgcagccagggggatcagcctctactgtgccttctagttgccagccatctgttgtttgcccctcccccttgccttccttgaccctggaaggtgccactcccactgtcctttcctaataaaatgaggaaattgcatcacattgtctgagtaggtgtcattctattctggggggtggggtggggcaggacagcaagggggaggattgggaagacaatagcaggcatgctggggatgcagtgggctctatggcttctgaggcagaaagaaccagctggggctcgagatccactagggccgcaggaacccctagtgatggagttggccactccctctctgcgcgctcgctcgctcactgaggccgggcgaccaaaggtcgcccgacgcccgggctttgcccgggcggcctcagtgagcgagcgagcgcgcag

SEQ ID NO: 10 - DNA, 3361 bp, Artificial Sequence
  pAAV_ApoE_hAAT_HBB2m1_NOTCH2.SERPING1_BGH228
ctgcgcgctcgctcgctcactgaggccgcccgggcaaagcccgggcggcctcagtgagcgagcgagcgcgcagagagggagtggccaactccatcactaggggttcctgcggcctagtaggctcagaggcacacaggagtttctgggctcaccctgcccccttccaacccctcagttcccatcctccagcagctgtttgtgtgctgcctctgaagtccacactgaacaaacttcagcctactcatgtccctaaaatgggcaaacattgcaagcagcaaacagcaaacacacagccctccctgcctgctgaccttggagctggggcagaggtcagagacctctctgggcccatgccacctccaacatccactcgaccccttggaatttcggtggagaggagcagaggttgtcctggcgtggtttaggtagtgtgagaggggtacccggggatcttgctaccagtggaacagccactaaggattctgcagtgagagcagagggccagctaagtggtactctcccagagactgtctgactcacgccaccccctccaccttggacacaggacgctgtggtttctgagccaggtacaatgactcctttcggtaagtgcagtggaagctgtacactgcccaggcaaagcgtccgggcagcgtaggcgggcgactcagatcccagccagtggacttagcccctgtttgctcctccgataactggggtgaccttggttaatattcaccagcagcctcccccgttgcccctctggatccactgcttaaatacggacgaggacagggccctgtctcctcagcttcaggcaccaccactgacctgggacagtgaatagatcctgagaacttcagggtgagtctatgggacccttgatgttttctttccccttcttttctatggttaagttcatgtcataggaaggggagaagtaacagggtacacatattgaccaaatcagggtaattttgcatttgtaattttaaaaaatgctttcttcttttaatatacttttttgtttatcttatttctaatactttccctaatctctttctttcagggcaataatgatacaatgtatcatgcctctttgcaccattctaaagaataacagtgataatttctgggttaaggcaatagcaatatttctgcatataaatatttctgcatataaattgtaactgatgtaagaggtttcatattgctaatagcagctacaatccagctaccattctgcttttattttctggttgggataaggctggattattctgagtccaagctaggcccttttgctaatcttgttcatacctcttatcttcctcccacagctcctgggcaacctgctggtctctctgctggcccatcactttggcaaagcacgcgtgccaccatgcccgccctgcgccccgctctgctgtgggcgctgctggcgctctggctgtgctgcgcggcccccgcgcatgcaaatccaaatgctaccagctccagctcccaggatccagagagtttgcaagacagaggcgaagggaaggtcgcaacaacagttatctccaagatgctattcgttgaacccatcctggaggtttccagcttgccgacaaccaactcaacaaccaattcagccaccaaaataacagctaataccactgatgaacccaccacacaacccaccacagagcccaccacccaacccaccatccaacccacccaaccaactacccagctcccaacagattctcctacccagcccactactgggtccttctgcccaggacctgttactctctgctctgacttggagagtcattcaacagaggccgtgttgggggatgctttggtagatttctccctgaagctctaccacgccttctcagcaatgaagaaggtggagaccaacatggccttttccccattcagcatcgccagcctccttacccaggtcctgctcggggctggggagaacaccaaaacaaacctggagagcatcctctcttaccccaaggacttcacctgtgtccaccaggccctgaagggcttcacgaccaaaggtgtcacctcagtctctcagattttccacagcccagacctggccataagggacacctttgtgaatgcctctcggaccctgtacagcagcagccccagagtcctaagcaacaacagtgacgccaacttggagctcatcaacacctgggtggccaagaacaccaacaacaagatcagccggctgctagacagtctgccctccgatacccgccttgtcctcctcaatgctatctacctgagtgccaagtggaagacaacatttgatcccaagaaaaccagaatggaaccctttcacttcaaaaactcagttataaaagtgcccatgatgaatagcaagaagtaccctgtggcccatttcattgaccaaactttgaaagccaaggtggggcagctgcagctctcccacaatctgagtttggtgatcctggtaccccagaacctgaaacatcgtcttgaagacatggaacaggctctcagcccttctgttttcaaggccatcatggagaaactggagatgtccaagttccagcccactctcctaacactaccccgcatcaaagtgacgaccagccaggatatgctctcaatcatggagaaattggaattcttcgatttttcttatgaccttaacctgtgtgggctgacagaggaccctgatcttcaggtttctgcgatgcagcaccagacagtgctggaactgacagagactggggtggaggcggctgcagcctccgccatctctgtggcccgcaccctgctggtctttgaagtgcagcagcccttcctcttcgtgctctgggaccagcagcacaagttccctgtcttcatggggcgagtatatgaccccagggcctgaagatctagagctgaattcctgcagccagggggatcagcctctactgtgccttctagttgccagccatctgttgtttgcccctcccccttgccttccttgaccctggaaggtgccactcccactgtcctttcctaataaaatgaggaaattgcatcacattgtctgagtaggtgtcattctattctggggggtggggtggggcaggacagcaagggggaggattgggaagacaatagcaggcatgctggggatgcagtgggctctatggcttctgaggcagaaagaaccagctggggctcgagatccactagggccgcaggaacccctagtgatggagttggccactccctctctgcgcgctcgctcgctcactgaggccgggcgaccaaaggtcgcccgacgcccgggctttgcccgggcggcctcagtgagcgagcgagcgcgcag

SEQ ID NO: 11 - DNA, 3349 bp, Artificial Sequence
  pAAV_ApoE_hAAT_HBB2m1_STRC.SERPING1_BGH228
ctgcgcgctcgctcgctcactgaggccgcccgggcaaagcccgggcggcctcagtgagcgagcgagcgcgcagagagggagtggccaactccatcactaggggttcctgcggcctagtaggctcagaggcacacaggagtttctgggctcaccctgcccccttccaacccctcagttcccatcctccagcagctgtttgtgtgctgcctctgaagtccacactgaacaaacttcagcctactcatgtccctaaaatgggcaaacattgcaagcagcaaacagcaaacacacagccctccctgcctgctgaccttggagctggggcagaggtcagagacctctctgggcccatgccacctccaacatccactcgaccccttggaatttcggtggagaggagcagaggttgtcctggcgtggtttaggtagtgtgagaggggtacccggggatcttgctaccagtggaacagccactaaggattctgcagtgagagcagagggccagctaagtggtactctcccagagactgtctgactcacgccaccccctccaccttggacacaggacgctgtggtttctgagccaggtacaatgactcctttcggtaagtgcagtggaagctgtacactgcccaggcaaagcgtccgggcagcgtaggcgggcgactcagatcccagccagtggacttagcccctgtttgctcctccgataactggggtgaccttggttaatattcaccagcagcctcccccgttgcccctctggatccactgcttaaatacggacgaggacagggccctgtctcctcagcttcaggcaccaccactgacctgggacagtgaatagatcctgagaacttcagggtgagtctatgggacccttgatgttttctttccccttcttttctatggttaagttcatgtcataggaaggggagaagtaacagggtacacatattgaccaaatcagggtaattttgcatttgtaattttaaaaaatgctttcttcttttaatatacttttttgtttatcttatttctaatactttccctaatctctttctttcagggcaataatgatacaatgtatcatgcctctttgcaccattctaaagaataacagtgataatttctgggttaaggcaatagcaatatttctgcatataaatatttctgcatataaattgtaactgatgtaagaggtttcatattgctaatagcagctacaatccagctaccattctgcttttattttctggttgggataaggctggattattctgagtccaagctaggcccttttgctaatcttgttcatacctcttatcttcctcccacagctcctgggcaacctgctggtctctctgctggcccatcactttggcaaagcacgcgtgccaccatggctctcagcctctggcccctgctgctgctgctgctgctgctgctgctgctgtcctttgcaaatccaaatgctaccagctccagctcccaggatccagagagtttgcaagacagaggcgaagggaaggtcgcaacaacagttatctccaagatgctattcgttgaacccatcctggaggtttccagcttgccgacaaccaactcaacaaccaattcagccaccaaaataacagctaataccactgatgaacccaccacacaacccaccacagagcccaccacccaacccaccatccaacccacccaaccaactacccagctcccaacagattctcctacccagcccactactgggtccttctgcccaggacctgttactctctgctctgacttggagagtcattcaacagaggccgtgttgggggatgctttggtagatttctccctgaagctctaccacgccttctcagcaatgaagaaggtggagaccaacatggccttttccccattcagcatcgccagcctccttacccaggtcctgctcggggctggggagaacaccaaaacaaacctggagagcatcctctcttaccccaaggacttcacctgtgtccaccaggccctgaagggcttcacgaccaaaggtgtcacctcagtctctcagattttccacagcccagacctggccataagggacacctttgtgaatgcctctcggaccctgtacagcagcagccccagagtcctaagcaacaacagtgacgccaacttggagctcatcaacacctgggtggccaagaacaccaacaacaagatcagccggctgctagacagtctgccctccgatacccgccttgtcctcctcaatgctatctacctgagtgccaagtggaagacaacatttgatcccaagaaaaccagaatggaaccctttcacttcaaaaactcagttataaaagtgcccatgatgaatagcaagaagtaccctgtggcccatttcattgaccaaactttgaaagccaaggtggggcagctgcagctctcccacaatctgagtttggtgatcctggtaccccagaacctgaaacatcgtcttgaagacatggaacaggctctcagcccttctgttttcaaggccatcatggagaaactggagatgtccaagttccagcccactctcctaacactaccccgcatcaaagtgacgaccagccaggatatgctctcaatcatggagaaattggaattcttcgatttttcttatgaccttaacctgtgtgggctgacagaggaccctgatcttcaggtttctgcgatgcagcaccagacagtgctggaactgacagagactggggtggaggcggctgcagcctccgccatctctgtggcccgcaccctgctggtctttgaagtgcagcagcccttcctcttcgtgctctgggaccagcagcacaagttccctgtcttcatggggcgagtatatgaccccagggcctgaagatctagagctgaattcctgcagccagggggatcagcctctactgtgccttctagttgccagccatctgttgtttgcccctcccccttgccttccttgaccctggaaggtgccactcccactgtcctttcctaataaaatgaggaaattgcatcacattgtctgagtaggtgtcattctattctggggggtggggtggggcaggacagcaagggggaggattgggaagacaatagcaggcatgctggggatgcagtgggctctatggcttctgaggcagaaagaaccagctggggctcgagatccactagggccgcaggaacccctagtgatggagttggccactccctctctgcgcgctcgctcgctcactgaggccgggcgaccaaaggtcgcccgacgcccgggctttgcccgggcggcctcagtgagcgagcgagcgcgcag

SEQ ID NO: 12 - DNA, 3340 bp, Artificial Sequence
  pAAV_ApoE_hAAT_HBB2m1_AHSG.SERPING1_BGH228
ctgcgcgctcgctcgctcactgaggccgcccgggcaaagcccgggcggcctcagtgagcgagcgagcgcgcagagagggagtggccaactccatcactaggggttcctgcggcctagtaggctcagaggcacacaggagtttctgggctcaccctgcccccttccaacccctcagttcccatcctccagcagctgtttgtgtgctgcctctgaagtccacactgaacaaacttcagcctactcatgtccctaaaatgggcaaacattgcaagcagcaaacagcaaacacacagccctccctgcctgctgaccttggagctggggcagaggtcagagacctctctgggcccatgccacctccaacatccactcgaccccttggaatttcggtggagaggagcagaggttgtcctggcgtggtttaggtagtgtgagaggggtacccggggatcttgctaccagtggaacagccactaaggattctgcagtgagagcagagggccagctaagtggtactctcccagagactgtctgactcacgccaccccctccaccttggacacaggacgctgtggtttctgagccaggtacaatgactcctttcggtaagtgcagtggaagctgtacactgcccaggcaaagcgtccgggcagcgtaggcgggcgactcagatcccagccagtggacttagcccctgtttgctcctccgataactggggtgaccttggttaatattcaccagcagcctcccccgttgcccctctggatccactgcttaaatacggacgaggacagggccctgtctcctcagcttcaggcaccaccactgacctgggacagtgaatagatcctgagaacttcagggtgagtctatgggacccttgatgttttctttccccttcttttctatggttaagttcatgtcataggaaggggagaagtaacagggtacacatattgaccaaatcagggtaattttgcatttgtaattttaaaaaatgctttcttcttttaatatacttttttgtttatcttatttctaatactttccctaatctctttctttcagggcaataatgatacaatgtatcatgcctctttgcaccattctaaagaataacagtgataatttctgggttaaggcaatagcaatatttctgcatataaatatttctgcatataaattgtaactgatgtaagaggtttcatattgctaatagcagctacaatccagctaccattctgcttttattttctggttgggataaggctggattattctgagtccaagctaggcccttttgctaatcttgttcatacctcttatcttcctcccacagctcctgggcaacctgctggtctctctgctggcccatcactttggcaaagcacgcgtgccaccatgaagtccctcgtcctgctcctttgtcttgctcagctctggggctgccactcaaatccaaatgctaccagctccagctcccaggatccagagagtttgcaagacagaggcgaagggaaggtcgcaacaacagttatctccaagatgctattcgttgaacccatcctggaggtttccagcttgccgacaaccaactcaacaaccaattcagccaccaaaataacagctaataccactgatgaacccaccacacaacccaccacagagcccaccacccaacccaccatccaacccacccaaccaactacccagctcccaacagattctcctacccagcccactactgggtccttctgcccaggacctgttactctctgctctgacttggagagtcattcaacagaggccgtgttgggggatgctttggtagatttctccctgaagctctaccacgccttctcagcaatgaagaaggtggagaccaacatggccttttccccattcagcatcgccagcctccttacccaggtcctgctcggggctggggagaacaccaaaacaaacctggagagcatcctctcttaccccaaggacttcacctgtgtccaccaggccctgaagggcttcacgaccaaaggtgtcacctcagtctctcagattttccacagcccagacctggccataagggacacctttgtgaatgcctctcggaccctgtacagcagcagccccagagtcctaagcaacaacagtgacgccaacttggagctcatcaacacctgggtggccaagaacaccaacaacaagatcagccggctgctagacagtctgccctccgatacccgccttgtcctcctcaatgctatctacctgagtgccaagtggaagacaacatttgatcccaagaaaaccagaatggaaccctttcacttcaaaaactcagttataaaagtgcccatgatgaatagcaagaagtaccctgtggcccatttcattgaccaaactttgaaagccaaggtggggcagctgcagctctcccacaatctgagtttggtgatcctggtaccccagaacctgaaacatcgtcttgaagacatggaacaggctctcagcccttctgttttcaaggccatcatggagaaactggagatgtccaagttccagcccactctcctaacactaccccgcatcaaagtgacgaccagccaggatatgctctcaatcatggagaaattggaattcttcgatttttcttatgaccttaacctgtgtgggctgacagaggaccctgatcttcaggtttctgcgatgcagcaccagacagtgctggaactgacagagactggggtggaggcggctgcagcctccgccatctctgtggcccgcaccctgctggtctttgaagtgcagcagcccttcctcttcgtgctctgggaccagcagcacaagttccctgtcttcatggggcgagtatatgaccccagggcctgaagatctagagctgaattcctgcagccagggggatcagcctctactgtgccttctagttgccagccatctgttgtttgcccctcccccttgccttccttgaccctggaaggtgccactcccactgtcctttcctaataaaatgaggaaattgcatcacattgtctgagtaggtgtcattctattctggggggtggggtggggcaggacagcaagggggaggattgggaagacaatagcaggcatgctggggatgcagtgggctctatggcttctgaggcagaaagaaccagctggggctcgagatccactagggccgcaggaacccctagtgatggagttggccactccctctctgcgcgctcgctcgctcactgaggccgggcgaccaaaggtcgcccgacgcccgggctttgcccgggcggcctcagtgagcgagcgagcgcgcag

SEQ ID NO: 13 - DNA, 3349 bp, Artificial Sequence
  pAAV_ApoE_hAAT_HBB2m1_SYN1.SERPING1_BGH228
ctgcgcgctcgctcgctcactgaggccgcccgggcaaagcccgggcggcctcagtgagcgagcgagcgcgcagagagggagtggccaactccatcactaggggttcctgcggcctagtaggctcagaggcacacaggagtttctgggctcaccctgcccccttccaacccctcagttcccatcctccagcagctgtttgtgtgctgcctctgaagtccacactgaacaaacttcagcctactcatgtccctaaaatgggcaaacattgcaagcagcaaacagcaaacacacagccctccctgcctgctgaccttggagctggggcagaggtcagagacctctctgggcccatgccacctccaacatccactcgaccccttggaatttcggtggagaggagcagaggttgtcctggcgtggtttaggtagtgtgagaggggtacccggggatcttgctaccagtggaacagccactaaggattctgcagtgagagcagagggccagctaagtggtactctcccagagactgtctgactcacgccaccccctccaccttggacacaggacgctgtggtttctgagccaggtacaatgactcctttcggtaagtgcagtggaagctgtacactgcccaggcaaagcgtccgggcagcgtaggcgggcgactcagatcccagccagtggacttagcccctgtttgctcctccgataactggggtgaccttggttaatattcaccagcagcctcccccgttgcccctctggatccactgcttaaatacggacgaggacagggccctgtctcctcagcttcaggcaccaccactgacctgggacagtgaatagatcctgagaacttcagggtgagtctatgggacccttgatgttttctttccccttcttttctatggttaagttcatgtcataggaaggggagaagtaacagggtacacatattgaccaaatcagggtaattttgcatttgtaattttaaaaaatgctttcttcttttaatatacttttttgtttatcttatttctaatactttccctaatctctttctttcagggcaataatgatacaatgtatcatgcctctttgcaccattctaaagaataacagtgataatttctgggttaaggcaatagcaatatttctgcatataaatatttctgcatataaattgtaactgatgtaagaggtttcatattgctaatagcagctacaatccagctaccattctgcttttattttctggttgggataaggctggattattctgagtccaagctaggcccttttgctaatcttgttcatacctcttatcttcctcccacagctcctgggcaacctgctggtctctctgctggcccatcactttggcaaagcacgcgtgccaccatgaagttcgccctggtggccgccctggccctgctgctgttcctgtggagcagctgcagggccaatccaaatgctaccagctccagctcccaggatccagagagtttgcaagacagaggcgaagggaaggtcgcaacaacagttatctccaagatgctattcgttgaacccatcctggaggtttccagcttgccgacaaccaactcaacaaccaattcagccaccaaaataacagctaataccactgatgaacccaccacacaacccaccacagagcccaccacccaacccaccatccaacccacccaaccaactacccagctcccaacagattctcctacccagcccactactgggtccttctgcccaggacctgttactctctgctctgacttggagagtcattcaacagaggccgtgttgggggatgctttggtagatttctccctgaagctctaccacgccttctcagcaatgaagaaggtggagaccaacatggccttttccccattcagcatcgccagcctccttacccaggtcctgctcggggctggggagaacaccaaaacaaacctggagagcatcctctcttaccccaaggacttcacctgtgtccaccaggccctgaagggcttcacgaccaaaggtgtcacctcagtctctcagattttccacagcccagacctggccataagggacacctttgtgaatgcctctcggaccctgtacagcagcagccccagagtcctaagcaacaacagtgacgccaacttggagctcatcaacacctgggtggccaagaacaccaacaacaagatcagccggctgctagacagtctgccctccgatacccgccttgtcctcctcaatgctatctacctgagtgccaagtggaagacaacatttgatcccaagaaaaccagaatggaaccctttcacttcaaaaactcagttataaaagtgcccatgatgaatagcaagaagtaccctgtggcccatttcattgaccaaactttgaaagccaaggtggggcagctgcagctctcccacaatctgagtttggtgatcctggtaccccagaacctgaaacatcgtcttgaagacatggaacaggctctcagcccttctgttttcaaggccatcatggagaaactggagatgtccaagttccagcccactctcctaacactaccccgcatcaaagtgacgaccagccaggatatgctctcaatcatggagaaattggaattcttcgatttttcttatgaccttaacctgtgtgggctgacagaggaccctgatcttcaggtttctgcgatgcagcaccagacagtgctggaactgacagagactggggtggaggcggctgcagcctccgccatctctgtggcccgcaccctgctggtctttgaagtgcagcagcccttcctcttcgtgctctgggaccagcagcacaagttccctgtcttcatggggcgagtatatgaccccagggcctgaagatctagagctgaattcctgcagccagggggatcagcctctactgtgccttctagttgccagccatctgttgtttgcccctcccccttgccttccttgaccctggaaggtgccactcccactgtcctttcctaataaaatgaggaaattgcatcacattgtctgagtaggtgtcattctattctggggggtggggtggggcaggacagcaagggggaggattgggaagacaatagcaggcatgctggggatgcagtgggctctatggcttctgaggcagaaagaaccagctggggctcgagatccactagggccgcaggaacccctagtgatggagttggccactccctctctgcgcgctcgctcgctcactgaggccgggcgaccaaaggtcgcccgacgcccgggctttgcccgggcggcctcagtgagcgagcgagcgcgcag

SEQ ID NO: 14 - DNA, 3346 bp, Artificial Sequence
  pAAV_ApoE_hAAT_HBB2m1_SYN2.SERPING1_BGH228
ctgcgcgctcgctcgctcactgaggccgcccgggcaaagcccgggcggcctcagtgagcgagcgagcgcgcagagagggagtggccaactccatcactaggggttcctgcggcctagtaggctcagaggcacacaggagtttctgggctcaccctgcccccttccaacccctcagttcccatcctccagcagctgtttgtgtgctgcctctgaagtccacactgaacaaacttcagcctactcatgtccctaaaatgggcaaacattgcaagcagcaaacagcaaacacacagccctccctgcctgctgaccttggagctggggcagaggtcagagacctctctgggcccatgccacctccaacatccactcgaccccttggaatttcggtggagaggagcagaggttgtcctggcgtggtttaggtagtgtgagaggggtacccggggatcttgctaccagtggaacagccactaaggattctgcagtgagagcagagggccagctaagtggtactctcccagagactgtctgactcacgccaccccctccaccttggacacaggacgctgtggtttctgagccaggtacaatgactcctttcggtaagtgcagtggaagctgtacactgcccaggcaaagcgtccgggcagcgtaggcgggcgactcagatcccagccagtggacttagcccctgtttgctcctccgataactggggtgaccttggttaatattcaccagcagcctcccccgttgcccctctggatccactgcttaaatacggacgaggacagggccctgtctcctcagcttcaggcaccaccactgacctgggacagtgaatagatcctgagaacttcagggtgagtctatgggacccttgatgttttctttccccttcttttctatggttaagttcatgtcataggaaggggagaagtaacagggtacacatattgaccaaatcagggtaattttgcatttgtaattttaaaaaatgctttcttcttttaatatacttttttgtttatcttatttctaatactttccctaatctctttctttcagggcaataatgatacaatgtatcatgcctctttgcaccattctaaagaataacagtgataatttctgggttaaggcaatagcaatatttctgcatataaatatttctgcatataaattgtaactgatgtaagaggtttcatattgctaatagcagctacaatccagctaccattctgcttttattttctggttgggataaggctggattattctgagtccaagctaggcccttttgctaatcttgttcatacctcttatcttcctcccacagctcctgggcaacctgctggtctctctgctggcccatcactttggcaaagcacgcgtgccaccatgaagttcgccctggtggccgccctggccctgctgctgttcctgtggggctgccacagcaatccaaatgctaccagctccagctcccaggatccagagagtttgcaagacagaggcgaagggaaggtcgcaacaacagttatctccaagatgctattcgttgaacccatcctggaggtttccagcttgccgacaaccaactcaacaaccaattcagccaccaaaataacagctaataccactgatgaacccaccacacaacccaccacagagcccaccacccaacccaccatccaacccacccaaccaactacccagctcccaacagattctcctacccagcccactactgggtccttctgcccaggacctgttactctctgctctgacttggagagtcattcaacagaggccgtgttgggggatgctttggtagatttctccctgaagctctaccacgccttctcagcaatgaagaaggtggagaccaacatggccttttccccattcagcatcgccagcctccttacccaggtcctgctcggggctggggagaacaccaaaacaaacctggagagcatcctctcttaccccaaggacttcacctgtgtccaccaggccctgaagggcttcacgaccaaaggtgtcacctcagtctctcagattttccacagcccagacctggccataagggacacctttgtgaatgcctctcggaccctgtacagcagcagccccagagtcctaagcaacaacagtgacgccaacttggagctcatcaacacctgggtggccaagaacaccaacaacaagatcagccggctgctagacagtctgccctccgatacccgccttgtcctcctcaatgctatctacctgagtgccaagtggaagacaacatttgatcccaagaaaaccagaatggaaccctttcacttcaaaaactcagttataaaagtgcccatgatgaatagcaagaagtaccctgtggcccatttcattgaccaaactttgaaagccaaggtggggcagctgcagctctcccacaatctgagtttggtgatcctggtaccccagaacctgaaacatcgtcttgaagacatggaacaggctctcagcccttctgttttcaaggccatcatggagaaactggagatgtccaagttccagcccactctcctaacactaccccgcatcaaagtgacgaccagccaggatatgctctcaatcatggagaaattggaattcttcgatttttcttatgaccttaacctgtgtgggctgacagaggaccctgatcttcaggtttctgcgatgcagcaccagacagtgctggaactgacagagactggggtggaggcggctgcagcctccgccatctctgtggcccgcaccctgctggtctttgaagtgcagcagcccttcctcttcgtgctctgggaccagcagcacaagttccctgtcttcatggggcgagtatatgaccccagggcctgaagatctagagctgaattcctgcagccagggggatcagcctctactgtgccttctagttgccagccatctgttgtttgcccctcccccttgccttccttgaccctggaaggtgccactcccactgtcctttcctaataaaatgaggaaattgcatcacattgtctgagtaggtgtcattctattctggggggtggggtggggcaggacagcaagggggaggattgggaagacaatagcaggcatgctggggatgcagtgggctctatggcttctgaggcagaaagaaccagctggggctcgagatccactagggccgcaggaacccctagtgatggagttggccactccctctctgcgcgctcgctcgctcactgaggccgggcgaccaaaggtcgcccgacgcccgggctttgcccgggcggcctcagtgagcgagcgagcgcgcag

SEQ ID NO: 15 - DNA, 3349 bp, Artificial Sequence
  pAAV_ApoE_hAAT_HBB2m1_SYN3.SERPING1_BGH228
ctgcgcgctcgctcgctcactgaggccgcccgggcaaagcccgggcggcctcagtgagcgagcgagcgcgcagagagggagtggccaactccatcactaggggttcctgcggcctagtaggctcagaggcacacaggagtttctgggctcaccctgcccccttccaacccctcagttcccatcctccagcagctgtttgtgtgctgcctctgaagtccacactgaacaaacttcagcctactcatgtccctaaaatgggcaaacattgcaagcagcaaacagcaaacacacagccctccctgcctgctgaccttggagctggggcagaggtcagagacctctctgggcccatgccacctccaacatccactcgaccccttggaatttcggtggagaggagcagaggttgtcctggcgtggtttaggtagtgtgagaggggtacccggggatcttgctaccagtggaacagccactaaggattctgcagtgagagcagagggccagctaagtggtactctcccagagactgtctgactcacgccaccccctccaccttggacacaggacgctgtggtttctgagccaggtacaatgactcctttcggtaagtgcagtggaagctgtacactgcccaggcaaagcgtccgggcagcgtaggcgggcgactcagatcccagccagtggacttagcccctgtttgctcctccgataactggggtgaccttggttaatattcaccagcagcctcccccgttgcccctctggatccactgcttaaatacggacgaggacagggccctgtctcctcagcttcaggcaccaccactgacctgggacagtgaatagatcctgagaacttcagggtgagtctatgggacccttgatgttttctttccccttcttttctatggttaagttcatgtcataggaaggggagaagtaacagggtacacatattgaccaaatcagggtaattttgcatttgtaattttaaaaaatgctttcttcttttaatatacttttttgtttatcttatttctaatactttccctaatctctttctttcagggcaataatgatacaatgtatcatgcctctttgcaccattctaaagaataacagtgataatttctgggttaaggcaatagcaatatttctgcatataaatatttctgcatataaattgtaactgatgtaagaggtttcatattgctaatagcagctacaatccagctaccattctgcttttattttctggttgggataaggctggattattctgagtccaagctaggcccttttgctaatcttgttcatacctcttatcttcctcccacagctcctgggcaacctgctggtctctctgctggcccatcactttggcaaagcacgcgtgccaccatgaagtgggtgaccctgctgaccctgctgctgctgctgctgttcctgtggggctgccacagcaatccaaatgctaccagctccagctcccaggatccagagagtttgcaagacagaggcgaagggaaggtcgcaacaacagttatctccaagatgctattcgttgaacccatcctggaggtttccagcttgccgacaaccaactcaacaaccaattcagccaccaaaataacagctaataccactgatgaacccaccacacaacccaccacagagcccaccacccaacccaccatccaacccacccaaccaactacccagctcccaacagattctcctacccagcccactactgggtccttctgcccaggacctgttactctctgctctgacttggagagtcattcaacagaggccgtgttgggggatgctttggtagatttctccctgaagctctaccacgccttctcagcaatgaagaaggtggagaccaacatggccttttccccattcagcatcgccagcctccttacccaggtcctgctcggggctggggagaacaccaaaacaaacctggagagcatcctctcttaccccaaggacttcacctgtgtccaccaggccctgaagggcttcacgaccaaaggtgtcacctcagtctctcagattttccacagcccagacctggccataagggacacctttgtgaatgcctctcggaccctgtacagcagcagccccagagtcctaagcaacaacagtgacgccaacttggagctcatcaacacctgggtggccaagaacaccaacaacaagatcagccggctgctagacagtctgccctccgatacccgccttgtcctcctcaatgctatctacctgagtgccaagtggaagacaacatttgatcccaagaaaaccagaatggaaccctttcacttcaaaaactcagttataaaagtgcccatgatgaatagcaagaagtaccctgtggcccatttcattgaccaaactttgaaagccaaggtggggcagctgcagctctcccacaatctgagtttggtgatcctggtaccccagaacctgaaacatcgtcttgaagacatggaacaggctctcagcccttctgttttcaaggccatcatggagaaactggagatgtccaagttccagcccactctcctaacactaccccgcatcaaagtgacgaccagccaggatatgctctcaatcatggagaaattggaattcttcgatttttcttatgaccttaacctgtgtgggctgacagaggaccctgatcttcaggtttctgcgatgcagcaccagacagtgctggaactgacagagactggggtggaggcggctgcagcctccgccatctctgtggcccgcaccctgctggtctttgaagtgcagcagcccttcctcttcgtgctctgggaccagcagcacaagttccctgtcttcatggggcgagtatatgaccccagggcctgaagatctagagctgaattcctgcagccagggggatcagcctctactgtgccttctagttgccagccatctgttgtttgcccctcccccttgccttccttgaccctggaaggtgccactcccactgtcctttcctaataaaatgaggaaattgcatcacattgtctgagtaggtgtcattctattctggggggtggggtggggcaggacagcaagggggaggattgggaagacaatagcaggcatgctggggatgcagtgggctctatggcttctgaggcagaaagaaccagctggggctcgagatccactagggccgcaggaacccctagtgatggagttggccactccctctctgcgcgctcgctcgctcactgaggccgggcgaccaaaggtcgcccgacgcccgggctttgcccgggcggcctcagtgagcgagcgagcgcgcag

SEQ ID NO: 16 - DNA, 3352 bp, Artificial Sequence
  pAAV_ApoE_hAAT_HBB2m1_SYN4.SERPING1_BGH228
ctgcgcgctcgctcgctcactgaggccgcccgggcaaagcccgggcggcctcagtgagcgagcgagcgcgcagagagggagtggccaactccatcactaggggttcctgcggcctagtaggctcagaggcacacaggagtttctgggctcaccctgcccccttccaacccctcagttcccatcctccagcagctgtttgtgtgctgcctctgaagtccacactgaacaaacttcagcctactcatgtccctaaaatgggcaaacattgcaagcagcaaacagcaaacacacagccctccctgcctgctgaccttggagctggggcagaggtcagagacctctctgggcccatgccacctccaacatccactcgaccccttggaatttcggtggagaggagcagaggttgtcctggcgtggtttaggtagtgtgagaggggtacccggggatcttgctaccagtggaacagccactaaggattctgcagtgagagcagagggccagctaagtggtactctcccagagactgtctgactcacgccaccccctccaccttggacacaggacgctgtggtttctgagccaggtacaatgactcctttcggtaagtgcagtggaagctgtacactgcccaggcaaagcgtccgggcagcgtaggcgggcgactcagatcccagccagtggacttagcccctgtttgctcctccgataactggggtgaccttggttaatattcaccagcagcctcccccgttgcccctctggatccactgcttaaatacggacgaggacagggccctgtctcctcagcttcaggcaccaccactgacctgggacagtgaatagatcctgagaacttcagggtgagtctatgggacccttgatgttttctttccccttcttttctatggttaagttcatgtcataggaaggggagaagtaacagggtacacatattgaccaaatcagggtaattttgcatttgtaattttaaaaaatgctttcttcttttaatatacttttttgtttatcttatttctaatactttccctaatctctttctttcagggcaataatgatacaatgtatcatgcctctttgcaccattctaaagaataacagtgataatttctgggttaaggcaatagcaatatttctgcatataaatatttctgcatataaattgtaactgatgtaagaggtttcatattgctaatagcagctacaatccagctaccattctgcttttattttctggttgggataaggctggattattctgagtccaagctaggcccttttgctaatcttgttcatacctcttatcttcctcccacagctcctgggcaacctgctggtctctctgctggcccatcactttggcaaagcacgcgtgccaccatgaagtgggtgaccctgctgaccctgctgctgctgctgctgttcctgtggagcagctgcagggccaatccaaatgctaccagctccagctcccaggatccagagagtttgcaagacagaggcgaagggaaggtcgcaacaacagttatctccaagatgctattcgttgaacccatcctggaggtttccagcttgccgacaaccaactcaacaaccaattcagccaccaaaataacagctaataccactgatgaacccaccacacaacccaccacagagcccaccacccaacccaccatccaacccacccaaccaactacccagctcccaacagattctcctacccagcccactactgggtccttctgcccaggacctgttactctctgctctgacttggagagtcattcaacagaggccgtgttgggggatgctttggtagatttctccctgaagctctaccacgccttctcagcaatgaagaaggtggagaccaacatggccttttccccattcagcatcgccagcctccttacccaggtcctgctcggggctggggagaacaccaaaacaaacctggagagcatcctctcttaccccaaggacttcacctgtgtccaccaggccctgaagggcttcacgaccaaaggtgtcacctcagtctctcagattttccacagcccagacctggccataagggacacctttgtgaatgcctctcggaccctgtacagcagcagccccagagtcctaagcaacaacagtgacgccaacttggagctcatcaacacctgggtggccaagaacaccaacaacaagatcagccggctgctagacagtctgccctccgatacccgccttgtcctcctcaatgctatctacctgagtgccaagtggaagacaacatttgatcccaagaaaaccagaatggaaccctttcacttcaaaaactcagttataaaagtgcccatgatgaatagcaagaagtaccctgtggcccatttcattgaccaaactttgaaagccaaggtggggcagctgcagctctcccacaatctgagtttggtgatcctggtaccccagaacctgaaacatcgtcttgaagacatggaacaggctctcagcccttctgttttcaaggccatcatggagaaactggagatgtccaagttccagcccactctcctaacactaccccgcatcaaagtgacgaccagccaggatatgctctcaatcatggagaaattggaattcttcgatttttcttatgaccttaacctgtgtgggctgacagaggaccctgatcttcaggtttctgcgatgcagcaccagacagtgctggaactgacagagactggggtggaggcggctgcagcctccgccatctctgtggcccgcaccctgctggtctttgaagtgcagcagcccttcctcttcgtgctctgggaccagcagcacaagttccctgtcttcatggggcgagtatatgaccccagggcctgaagatctagagctgaattcctgcagccagggggatcagcctctactgtgccttctagttgccagccatctgttgtttgcccctcccccttgccttccttgaccctggaaggtgccactcccactgtcctttcctaataaaatgaggaaattgcatcacattgtctgagtaggtgtcattctattctggggggtggggtggggcaggacagcaagggggaggattgggaagacaatagcaggcatgctggggatgcagtgggctctatggcttctgaggcagaaagaaccagctggggctcgagatccactagggccgcaggaacccctagtgatggagttggccactccctctctgcgcgctcgctcgctcactgaggccgggcgaccaaaggtcgcccgacgcccgggctttgcccgggcggcctcagtgagcgagcgagcgcgcag

SEQ ID NO: 17 - DNA, 3352 bp, Artificial Sequence
  pAAV_ApoE_hAAT_HBB2m1_SERPING1coI2_BGH228
ctgcgcgctcgctcgctcactgaggccgcccgggcaaagcccgggcggcctcagtgagcgagcgagcgcgcagagagggagtggccaactccatcactaggggttcctgcggcctagtaggctcagaggcacacaggagtttctgggctcaccctgcccccttccaacccctcagttcccatcctccagcagctgtttgtgtgctgcctctgaagtccacactgaacaaacttcagcctactcatgtccctaaaatgggcaaacattgcaagcagcaaacagcaaacacacagccctccctgcctgctgaccttggagctggggcagaggtcagagacctctctgggcccatgccacctccaacatccactcgaccccttggaatttcggtggagaggagcagaggttgtcctggcgtggtttaggtagtgtgagaggggtacccggggatcttgctaccagtggaacagccactaaggattctgcagtgagagcagagggccagctaagtggtactctcccagagactgtctgactcacgccaccccctccaccttggacacaggacgctgtggtttctgagccaggtacaatgactcctttcggtaagtgcagtggaagctgtacactgcccaggcaaagcgtccgggcagcgtaggcgggcgactcagatcccagccagtggacttagcccctgtttgctcctccgataactggggtgaccttggttaatattcaccagcagcctcccccgttgcccctctggatccactgcttaaatacggacgaggacagggccctgtctcctcagcttcaggcaccaccactgacctgggacagtgaatagatcctgagaacttcagggtgagtctatgggacccttgatgttttctttccccttcttttctatggttaagttcatgtcataggaaggggagaagtaacagggtacacatattgaccaaatcagggtaattttgcatttgtaattttaaaaaatgctttcttcttttaatatacttttttgtttatcttatttctaatactttccctaatctctttctttcagggcaataatgatacaatgtatcatgcctctttgcaccattctaaagaataacagtgataatttctgggttaaggcaatagcaatatttctgcatataaatatttctgcatataaattgtaactgatgtaagaggtttcatattgctaatagcagctacaatccagctaccattctgcttttattttctggttgggataaggctggattattctgagtccaagctaggcccttttgctaatcttgttcatacctcttatcttcctcccacagctcctgggcaacctgctggtctctctgctggcccatcactttggcaaagcacgcgtgccaccatggctagcagactgactctgctgaccctgctgctgctgctgctggctggggacagggccagcagcaaccctaatgctacctctagctctagccaggaccctgagagcctgcaggataggggggagggcaaggtggccaccactgtgatcagcaagatgctgtttgtggagcctatcctggaggtgagcagcctgcccaccaccaactctactaccaactctgctaccaagatcactgccaataccactgatgaacccaccactcagcccactactgagcccaccacccagcccaccattcagcccactcagcccactacccagctgcctactgactctcccacccagcccaccactggcagcttttgtcctggccctgtgaccctgtgctctgacctggagagccattctactgaggctgtgctgggggatgccctggtggacttcagcctgaagctgtaccatgccttctctgccatgaagaaggtggagaccaacatggccttcagccccttctctattgcctctctgctgacccaggtgctgctgggggctggggagaatactaagaccaacctggagagcattctgagctatcccaaggacttcacctgtgtgcaccaggccctgaaggggttcactactaaaggggtgacctctgtgtctcagatcttccacagccctgacctggccatcagggacacttttgtgaatgccagcaggaccctgtacagcagcagccccagagtgctgagcaataattctgatgctaatctggagctgattaacacttgggtggccaagaacaccaacaacaagatctctaggctgctggattctctgccctctgacaccaggctggtgctgctgaatgccatctatctgtctgccaagtggaagaccacctttgatcccaagaagaccaggatggagcccttccatttcaagaactctgtgattaaagtgcccatgatgaactctaagaagtatcctgtggcccacttcattgatcagactctgaaggccaaggtggggcagctgcagctgagccacaacctgagcctggtgatcctggtgccccagaatctgaagcacaggctggaggacatggagcaggccctgagcccctctgtgttcaaggccatcatggagaagctggagatgagcaagttccagcccaccctgctgactctgcccagaattaaggtgaccaccagccaggacatgctgagcatcatggagaagctggagttctttgacttctcttatgacctgaacctgtgtggcctgactgaggatcctgacctgcaggtgtctgccatgcagcaccagactgtgctggagctgactgagactggggtggaggctgctgctgcctctgccatttctgtggccaggaccctgctggtgtttgaggtgcagcagcccttcctgtttgtgctgtgggaccagcagcacaagtttcctgtgtttatgggcagggtgtatgaccctagggcctgaagatctagagctgaattcctgcagccagggggatcagcctctactgtgccttctagttgccagccatctgttgtttgcccctcccccttgccttccttgaccctggaaggtgccactcccactgtcctttcctaataaaatgaggaaattgcatcacattgtctgagtaggtgtcattctattctggggggtggggtggggcaggacagcaagggggaggattgggaagacaatagcaggcatgctggggatgcagtgggctctatggcttctgaggcagaaagaaccagctggggctcgagatccactagggccgcaggaacccctagtgatggagttggccactccctctctgcgcgctcgctcgctcactgaggccgggcgaccaaaggtcgcccgacgcccgggctttgcccgggcggcctcagtgagcgagcgagcgcgcag

SEQ ID NO: 18 - DNA, 3352 bp, Artificial Sequence
  pAAV_ApoE_hAAT_HBB2m1_SERPING1coI3_BGH228
ctgcgcgctcgctcgctcactgaggccgcccgggcaaagcccgggcggcctcagtgagcgagcgagcgcgcagagagggagtggccaactccatcactaggggttcctgcggcctagtaggctcagaggcacacaggagtttctgggctcaccctgcccccttccaacccctcagttcccatcctccagcagctgtttgtgtgctgcctctgaagtccacactgaacaaacttcagcctactcatgtccctaaaatgggcaaacattgcaagcagcaaacagcaaacacacagccctccctgcctgctgaccttggagctggggcagaggtcagagacctctctgggcccatgccacctccaacatccactcgaccccttggaatttcggtggagaggagcagaggttgtcctggcgtggtttaggtagtgtgagaggggtacccggggatcttgctaccagtggaacagccactaaggattctgcagtgagagcagagggccagctaagtggtactctcccagagactgtctgactcacgccaccccctccaccttggacacaggacgctgtggtttctgagccaggtacaatgactcctttcggtaagtgcagtggaagctgtacactgcccaggcaaagcgtccgggcagcgtaggcgggcgactcagatcccagccagtggacttagcccctgtttgctcctccgataactggggtgaccttggttaatattcaccagcagcctcccccgttgcccctctggatccactgcttaaatacggacgaggacagggccctgtctcctcagcttcaggcaccaccactgacctgggacagtgaatagatcctgagaacttcagggtgagtctatgggacccttgatgttttctttccccttcttttctatggttaagttcatgtcataggaaggggagaagtaacagggtacacatattgaccaaatcagggtaattttgcatttgtaattttaaaaaatgctttcttcttttaatatacttttttgtttatcttatttctaatactttccctaatctctttctttcagggcaataatgatacaatgtatcatgcctctttgcaccattctaaagaataacagtgataatttctgggttaaggcaatagcaatatttctgcatataaatatttctgcatataaattgtaactgatgtaagaggtttcatattgctaatagcagctacaatccagctaccattctgcttttattttctggttgggataaggctggattattctgagtccaagctaggcccttttgctaatcttgttcatacctcttatcttcctcccacagctcctgggcaacctgctggtctctctgctggcccatcactttggcaaagcacgcgtgccaccatggccagcaggctgaccctgctgactctgctgctgctgctgctggctggggacagggccagcagcaaccctaatgccacctccagcagcagccaggaccctgagagcctgcaggataggggggagggcaaggtggctactactgtgatcagcaagatgctgtttgtggagcctatcctggaggtgagcagcctgcccaccactaactctactactaattctgccactaagatcactgccaataccactgatgagccaaccactcagcccaccactgagcccaccacccagcccaccattcagcccactcagcctaccacccagctgcctactgacagccccactcagcccactactggctctttctgtcctgggcctgtgactctgtgctctgacctggaatcccacagcactgaggctgtgctgggggatgccctggtggatttcagcctgaagctgtaccatgctttctctgccatgaagaaggtggagaccaacatggccttcagccctttctctattgccagcctgctgactcaggtgctgctgggggctggggagaataccaagaccaacctggagtctatcctgagctatcccaaggacttcacttgtgtgcaccaggccctgaaggggttcaccaccaagggggtgacctctgtgtctcagatctttcacagccctgacctggccatcagggatacctttgtgaatgccagcaggaccctgtacagcagcagccccagggtgctgagcaacaactctgatgccaacctggagctgatcaacacctgggtggccaagaacaccaacaacaagatcagcaggctgctggacagcctgccctctgataccaggctggtgctgctgaatgccatctacctgtctgctaagtggaagaccacttttgatcctaagaagaccaggatggagccctttcacttcaagaactctgtgatcaaggtgcccatgatgaactctaagaaataccctgtggcccacttcattgatcagaccctgaaggccaaggtgggccagctgcagctgagccacaacctgagcttggtgatcctggtgcctcagaacctgaagcacaggctggaggacatggagcaggccctgagcccctctgtgttcaaggccattatggagaagctggagatgagcaagttccagcctaccctgctgaccctgcccaggatcaaggtgactactagccaggatatgctgagcatcatggagaagctggagttttttgatttcagctatgacctgaacctgtgtggcctgactgaggaccctgacctgcaggtgtctgccatgcagcatcagactgtgctggagctgactgagactggggtggaggctgctgctgcctctgccatctctgtggccaggaccctgctggtgtttgaggtgcagcagcctttcctgtttgtgctgtgggatcagcagcacaagtttcctgtgttcatgggcagggtgtatgaccccagggcttgaagatctagagctgaattcctgcagccagggggatcagcctctactgtgccttctagttgccagccatctgttgtttgcccctcccccttgccttccttgaccctggaaggtgccactcccactgtcctttcctaataaaatgaggaaattgcatcacattgtctgagtaggtgtcattctattctggggggtggggtggggcaggacagcaagggggaggattgggaagacaatagcaggcatgctggggatgcagtgggctctatggcttctgaggcagaaagaaccagctggggctcgagatccactagggccgcaggaacccctagtgatggagttggccactccctctctgcgcgctcgctcgctcactgaggccgggcgaccaaaggtcgcccgacgcccgggctttgcccgggcggcctcagtgagcgagcgagcgcgcag

SEQ ID NO: 19 - DNA, 3352 bp, Artificial Sequence
  pAAV_ApoE_hAAT_HBB2m1_SERPING1coI4_BGH228
ctgcgcgctcgctcgctcactgaggccgcccgggcaaagcccgggcggcctcagtgagcgagcgagcgcgcagagagggagtggccaactccatcactaggggttcctgcggcctagtaggctcagaggcacacaggagtttctgggctcaccctgcccccttccaacccctcagttcccatcctccagcagctgtttgtgtgctgcctctgaagtccacactgaacaaacttcagcctactcatgtccctaaaatgggcaaacattgcaagcagcaaacagcaaacacacagccctccctgcctgctgaccttggagctggggcagaggtcagagacctctctgggcccatgccacctccaacatccactcgaccccttggaatttcggtggagaggagcagaggttgtcctggcgtggtttaggtagtgtgagaggggtacccggggatcttgctaccagtggaacagccactaaggattctgcagtgagagcagagggccagctaagtggtactctcccagagactgtctgactcacgccaccccctccaccttggacacaggacgctgtggtttctgagccaggtacaatgactcctttcggtaagtgcagtggaagctgtacactgcccaggcaaagcgtccgggcagcgtaggcgggcgactcagatcccagccagtggacttagcccctgtttgctcctccgataactggggtgaccttggttaatattcaccagcagcctcccccgttgcccctctggatccactgcttaaatacggacgaggacagggccctgtctcctcagcttcaggcaccaccactgacctgggacagtgaatagatcctgagaacttcagggtgagtctatgggacccttgatgttttctttccccttcttttctatggttaagttcatgtcataggaaggggagaagtaacagggtacacatattgaccaaatcagggtaattttgcatttgtaattttaaaaaatgctttcttcttttaatatacttttttgtttatcttatttctaatactttccctaatctctttctttcagggcaataatgatacaatgtatcatgcctctttgcaccattctaaagaataacagtgataatttctgggttaaggcaatagcaatatttctgcatataaatatttctgcatataaattgtaactgatgtaagaggtttcatattgctaatagcagctacaatccagctaccattctgcttttattttctggttgggataaggctggattattctgagtccaagctaggcccttttgctaatcttgttcatacctcttatcttcctcccacagctcctgggcaacctgctggtctctctgctggcccatcactttggcaaagcacgcgtgccaccatggctagcagactgactctgctgaccctgctgctgctgctgctggctggggacagggccagcagcaaccctaatgctacctctagctctagccaggaccctgagagcctgcaggataggggggagggcaaggtggccaccactgtgatcagcaagatgctgtttgtggagcctatcctggaggtgagcagcctgcccaccaccaactctactaccaactctgctaccaagatcactgccaataccactgatgaacccaccactcagcccactactgagcccaccacccagcccaccattcagcccactcagcccactacccagctgcctactgactctcccacccagcccaccactgggagcttctgtccaggccctgtgactctgtgttctgacctggagagccacagcactgaagctgtgctgggggatgctctggtggacttcagcctgaagctgtaccatgccttctctgccatgaagaaggtggaaaccaacatggcctttagccccttcagcattgctagcctgctgactcaggtgctgctgggggctggggagaacactaagactaacctggagtctatcctgtcttatcccaaggacttcacctgtgtgcatcaggccctgaaggggttcaccaccaagggggtcacctctgtgagccagatctttcacagccctgatctggccatcagggacacctttgtgaatgcctctaggactctgtacagcagcagccccagggtgctgagcaacaactctgatgccaacctggagctgatcaacacctgggtggccaagaacactaacaacaagatcagcaggctgctggacagcctgccctctgacactaggctggtgctgctgaatgccatctatctgtctgccaagtggaagaccacctttgaccccaagaagactaggatggagccctttcattttaagaactctgtgatcaaggtgcccatgatgaacagcaagaaataccctgtggcccatttcattgaccagactctgaaggctaaggtgggccagctgcagctgagccacaacctgagcctggtgatcctggtgccacagaatctgaagcacaggctggaggacatggagcaggctctgtctccctctgtgttcaaggccatcatggagaagctggagatgtctaagttccagcccaccctgctgaccctgcccaggatcaaggtgaccacttctcaggacatgctgtctatcatggagaagctggagttttttgacttttcttatgacctgaacctgtgtggcctgactgaggaccctgatctgcaggtgtctgccatgcagcaccagactgtgctggagctgactgagactggggtggaggctgctgctgcttctgccatttctgtggctaggactctgctggtgtttgaggtgcagcagcccttcctgtttgtgctgtgggaccagcagcacaagttccctgtgttcatgggcagggtgtatgatcccagggcttgaagatctagagctgaattcctgcagccagggggatcagcctctactgtgccttctagttgccagccatctgttgtttgcccctcccccttgccttccttgaccctggaaggtgccactcccactgtcctttcctaataaaatgaggaaattgcatcacattgtctgagtaggtgtcattctattctggggggtggggtggggcaggacagcaagggggaggattgggaagacaatagcaggcatgctggggatgcagtgggctctatggcttctgaggcagaaagaaccagctggggctcgagatccactagggccgcaggaacccctagtgatggagttggccactccctctctgcgcgctcgctcgctcactgaggccgggcgaccaaaggtcgcccgacgcccgggctttgcccgggcggcctcagtgagcgagcgagcgcgcag

SEQ ID NO: 20 - DNA, 3352 bp, Artificial Sequence
  pAAV_ApoE_hAAT_HBB2m1_SERPING1coI7_BGH228
ctgcgcgctcgctcgctcactgaggccgcccgggcaaagcccgggcggcctcagtgagcgagcgagcgcgcagagagggagtggccaactccatcactaggggttcctgcggcctagtaggctcagaggcacacaggagtttctgggctcaccctgcccccttccaacccctcagttcccatcctccagcagctgtttgtgtgctgcctctgaagtccacactgaacaaacttcagcctactcatgtccctaaaatgggcaaacattgcaagcagcaaacagcaaacacacagccctccctgcctgctgaccttggagctggggcagaggtcagagacctctctgggcccatgccacctccaacatccactcgaccccttggaatttcggtggagaggagcagaggttgtcctggcgtggtttaggtagtgtgagaggggtacccggggatcttgctaccagtggaacagccactaaggattctgcagtgagagcagagggccagctaagtggtactctcccagagactgtctgactcacgccaccccctccaccttggacacaggacgctgtggtttctgagccaggtacaatgactcctttcggtaagtgcagtggaagctgtacactgcccaggcaaagcgtccgggcagcgtaggcgggcgactcagatcccagccagtggacttagcccctgtttgctcctccgataactggggtgaccttggttaatattcaccagcagcctcccccgttgcccctctggatccactgcttaaatacggacgaggacagggccctgtctcctcagcttcaggcaccaccactgacctgggacagtgaatagatcctgagaacttcagggtgagtctatgggacccttgatgttttctttccccttcttttctatggttaagttcatgtcataggaaggggagaagtaacagggtacacatattgaccaaatcagggtaattttgcatttgtaattttaaaaaatgctttcttcttttaatatacttttttgtttatcttatttctaatactttccctaatctctttctttcagggcaataatgatacaatgtatcatgcctctttgcaccattctaaagaataacagtgataatttctgggttaaggcaatagcaatatttctgcatataaatatttctgcatataaattgtaactgatgtaagaggtttcatattgctaatagcagctacaatccagctaccattctgcttttattttctggttgggataaggctggattattctgagtccaagctaggcccttttgctaatcttgttcatacctcttatcttcctcccacagctcctgggcaacctgctggtctctctgctggcccatcactttggcaaagcacgcgtgccaccatggctagcagactgactctgctgaccctgctgctgctgctgctggctggggacagggccagcagcaaccctaatgctacctctagctctagccaggaccctgagagcctgcaggataggggggagggcaaggtggccaccactgtgatcagcaagatgctgtttgtggagcctatcctggaggtgagcagcctgcccaccaccaactctactaccaactctgctaccaagatcactgccaataccactgatgaacccaccactcagcccactactgagcccaccacccagcccaccattcagcccactcagcccactacccagctgcctactgactctcccacccagcccaccactggcagcttctgccctgggcctgtgaccctgtgctctgacctggagagccattctactgaggctgtgctgggggatgccctggtggatttcagcctgaagctgtaccatgccttctctgccatgaagaaggtggagaccaacatggccttctctcccttcagcattgccagcctgctgacccaggtgctgctgggggctggggagaacaccaagaccaacctggagagcatcctgtcttaccccaaggacttcacctgtgtgcatcaggccctgaagggcttcactactaagggggtgacctctgtgtctcagattttccacagccctgacctggctattagggacacttttgtgaatgcttctaggaccctgtacagcagctctcccagggtgctgagcaacaactctgatgccaacctggagctgattaacacttgggtggccaagaacactaacaataagatcagcaggctgctggacagcctgccctctgacaccaggctggtgctgctgaatgccatctacctgtctgccaagtggaagactacttttgatcctaagaagaccaggatggagcctttccacttcaagaactctgtgatcaaggtgcccatgatgaattctaagaagtaccctgtggctcacttcattgaccagaccctgaaggccaaggtgggccagctgcagctgagccacaacctgagcctggtgattctggtgccccagaacctgaagcacaggctggaggacatggagcaggccctgagcccctctgtgttcaaggccatcatggagaagctggagatgagcaagttccagcctactctgctgactctgcccaggatcaaggtgaccactagccaggacatgctgagcattatggagaagctggagttctttgacttttcttatgatctgaacctgtgtggcctgactgaggaccctgacctgcaggtgtctgccatgcagcaccagactgtgctggagctgactgagactggggtggaggctgctgctgcctctgccatctctgtggctaggaccctgctggtgtttgaggtgcagcagcccttcctgtttgtgctgtgggaccagcagcacaagttccctgtcttcatgggcagggtgtatgatcccagggcttgaagatctagagctgaattcctgcagccagggggatcagcctctactgtgccttctagttgccagccatctgttgtttgcccctcccccttgccttccttgaccctggaaggtgccactcccactgtcctttcctaataaaatgaggaaattgcatcacattgtctgagtaggtgtcattctattctggggggtggggtggggcaggacagcaagggggaggattgggaagacaatagcaggcatgctggggatgcagtgggctctatggcttctgaggcagaaagaaccagctggggctcgagatccactagggccgcaggaacccctagtgatggagttggccactccctctctgcgcgctcgctcgctcactgaggccgggcgaccaaaggtcgcccgacgcccgggctttgcccgggcggcctcagtgagcgagcgagcgcgcag

SEQ ID NO: 21 - DNA, 3352 bp, Artificial Sequence
  pAAV_ApoE_hAAT_HBB2m1_SERPING1coI20_BGH228
ctgcgcgctcgctcgctcactgaggccgcccgggcaaagcccgggcggcctcagtgagcgagcgagcgcgcagagagggagtggccaactccatcactaggggttcctgcggcctagtaggctcagaggcacacaggagtttctgggctcaccctgcccccttccaacccctcagttcccatcctccagcagctgtttgtgtgctgcctctgaagtccacactgaacaaacttcagcctactcatgtccctaaaatgggcaaacattgcaagcagcaaacagcaaacacacagccctccctgcctgctgaccttggagctggggcagaggtcagagacctctctgggcccatgccacctccaacatccactcgaccccttggaatttcggtggagaggagcagaggttgtcctggcgtggtttaggtagtgtgagaggggtacccggggatcttgctaccagtggaacagccactaaggattctgcagtgagagcagagggccagctaagtggtactctcccagagactgtctgactcacgccaccccctccaccttggacacaggacgctgtggtttctgagccaggtacaatgactcctttcggtaagtgcagtggaagctgtacactgcccaggcaaagcgtccgggcagcgtaggcgggcgactcagatcccagccagtggacttagcccctgtttgctcctccgataactggggtgaccttggttaatattcaccagcagcctcccccgttgcccctctggatccactgcttaaatacggacgaggacagggccctgtctcctcagcttcaggcaccaccactgacctgggacagtgaatagatcctgagaacttcagggtgagtctatgggacccttgatgttttctttccccttcttttctatggttaagttcatgtcataggaaggggagaagtaacagggtacacatattgaccaaatcagggtaattttgcatttgtaattttaaaaaatgctttcttcttttaatatacttttttgtttatcttatttctaatactttccctaatctctttctttcagggcaataatgatacaatgtatcatgcctctttgcaccattctaaagaataacagtgataatttctgggttaaggcaatagcaatatttctgcatataaatatttctgcatataaattgtaactgatgtaagaggtttcatattgctaatagcagctacaatccagctaccattctgcttttattttctggttgggataaggctggattattctgagtccaagctaggcccttttgctaatcttgttcatacctcttatcttcctcccacagctcctgggcaacctgctggtctctctgctggcccatcactttggcaaagcacgcgtgccaccatggccagcaggctgaccctgctgaccctgctgctgctcctgctggctggggatagggccagcagcaaccccaatgctactagcagcagcagccaggatcctgagagcctgcaggacagaggggaagggaaggtggccaccactgtgatcagcaagatgctgtttgtggagcctatcctggaggtgagctctctgcccaccactaacagcaccaccaattctgctactaagatcactgccaacaccactgatgagcccaccacccagcctaccactgagccaactacccagcccaccatccagcccacccagcccaccactcagctgcctactgattctcctactcagcctaccactgggagcttctgccctgggcctgtgaccctgtgctctgacctggagtctcattctactgaggctgtgctgggggatgccctggtggacttcagcctgaagctgtaccatgctttctctgccatgaagaaggtggagactaacatggccttctctcctttctctattgccagcctgctgactcaggtgctgctgggggctggggagaataccaagactaacctggagagcatcctgtcttatcctaaggacttcacttgtgtgcatcaggccctgaagggcttcaccaccaagggggtgacttctgtgagccagattttccacagccctgacctggccatcagagacacctttgtgaatgccagcaggaccctgtattctagctctcccagggtgctgagcaacaactctgatgccaatctggaactgatcaacacttgggtggccaagaacaccaacaacaagatcagcaggctgctggatagcctgccctctgacaccaggctggtgctgctgaatgccatctacctgtctgccaagtggaagaccacctttgaccccaagaagactaggatggagcccttccacttcaagaactctgtgatcaaggtgcccatgatgaatagcaagaagtaccctgtggcccacttcattgaccagaccctgaaggccaaggtggggcagctgcagctgagccacaacctgagcctggtgatcctggtgccccagaacctgaagcacagactggaggacatggagcaggccctgagcccatctgtgttcaaggctattatggagaagctggagatgtctaagtttcagcctaccctgctgaccctgcccaggatcaaggtgactaccagccaggacatgctgagcatcatggagaagctggaattctttgacttcagctatgatctgaatctgtgtggcctgactgaagaccctgatttgcaggtgtctgctatgcagcaccagactgtgctggaactgactgagactggggtggaggctgctgctgcctctgccatctctgtggccaggaccctgctggtgtttgaggtgcagcagcctttcctgtttgtgctgtgggatcagcagcacaagttccctgtgttcatgggcagggtgtatgaccctagggcttgaagatctagagctgaattcctgcagccagggggatcagcctctactgtgccttctagttgccagccatctgttgtttgcccctcccccttgccttccttgaccctggaaggtgccactcccactgtcctttcctaataaaatgaggaaattgcatcacattgtctgagtaggtgtcattctattctggggggtggggtggggcaggacagcaagggggaggattgggaagacaatagcaggcatgctggggatgcagtgggctctatggcttctgaggcagaaagaaccagctggggctcgagatccactagggccgcaggaacccctagtgatggagttggccactccctctctgcgcgctcgctcgctcactgaggccgggcgaccaaaggtcgcccgacgcccgggctttgcccgggcggcctcagtgagcgagcgagcgcgcag

SEQ ID NO: 22 - DNA, 3352 bp, Artificial Sequence
  pAAV_ApoE_hAAT_HBB2m1_SERPING1co21_BGH228
ctgcgcgctcgctcgctcactgaggccgcccgggcaaagcccgggcggcctcagtgagcgagcgagcgcgcagagagggagtggccaactccatcactaggggttcctgcggcctagtaggctcagaggcacacaggagtttctgggctcaccctgcccccttccaacccctcagttcccatcctccagcagctgtttgtgtgctgcctctgaagtccacactgaacaaacttcagcctactcatgtccctaaaatgggcaaacattgcaagcagcaaacagcaaacacacagccctccctgcctgctgaccttggagctggggcagaggtcagagacctctctgggcccatgccacctccaacatccactcgaccccttggaatttcggtggagaggagcagaggttgtcctggcgtggtttaggtagtgtgagaggggtacccggggatcttgctaccagtggaacagccactaaggattctgcagtgagagcagagggccagctaagtggtactctcccagagactgtctgactcacgccaccccctccaccttggacacaggacgctgtggtttctgagccaggtacaatgactcctttcggtaagtgcagtggaagctgtacactgcccaggcaaagcgtccgggcagcgtaggcgggcgactcagatcccagccagtggacttagcccctgtttgctcctccgataactggggtgaccttggttaatattcaccagcagcctcccccgttgcccctctggatccactgcttaaatacggacgaggacagggccctgtctcctcagcttcaggcaccaccactgacctgggacagtgaatagatcctgagaacttcagggtgagtctatgggacccttgatgttttctttccccttcttttctatggttaagttcatgtcataggaaggggagaagtaacagggtacacatattgaccaaatcagggtaattttgcatttgtaattttaaaaaatgctttcttcttttaatatacttttttgtttatcttatttctaatactttccctaatctctttctttcagggcaataatgatacaatgtatcatgcctctttgcaccattctaaagaataacagtgataatttctgggttaaggcaatagcaatatttctgcatataaatatttctgcatataaattgtaactgatgtaagaggtttcatattgctaatagcagctacaatccagctaccattctgcttttattttctggttgggataaggctggattattctgagtccaagctaggcccttttgctaatcttgttcatacctcttatcttcctcccacagctcctgggcaacctgctggtctctctgctggcccatcactttggcaaagcacgcgtgccaccatggcctctaggctgactctgctgactctgctgctcctgctgctggctggggacagggccagctctaaccccaatgctacttctagctcctctcaggaccctgagagcctgcaggacaggggggagggcaaggtggccaccactgtgatctctaagatgctgtttgtggagcccatcctggaggtgagcagcctgcccaccaccaacagcaccaccaactctgccactaagatcactgccaacaccactgatgagcccaccacccagcccactactgagcccaccacccagcctactatccagcccacccagcccactacccagctgcccactgacagccctacccagcccaccactggcagcttctgccctgggcctgtgaccctgtgctctgacctggagagccattctactgaggctgtgctgggggatgccctggtggacttctctctgaagctgtaccatgctttctctgccatgaagaaggtggagactaacatggcttttagccccttcagcattgctagcctgctgacccaggtgctgctgggggctggggagaacactaagaccaacctggaatctatcctgagctaccccaaggacttcacctgtgtgcaccaggccctgaagggcttcaccaccaagggggtgacctctgtgagccagatcttccacagccctgacctggccatcagggatacttttgtgaatgccagcagaaccctgtactcttctagccccagggtgctgagcaataattctgatgctaacctggagctgatcaatacctgggtggctaagaataccaacaacaagattagcaggctgctggactctctgccttctgataccaggctggtgctgctgaatgccatttacctgtctgccaagtggaagaccacttttgaccctaagaagactaggatggagcctttccacttcaagaactctgtcattaaggtgcccatgatgaacagcaagaagtatcctgtggcccactttattgaccagactctgaaggccaaggtgggccagctgcagctgagccataacctgagcctggtgatcctggtgccccagaacctgaagcataggctggaggacatggagcaggctctgagcccctctgtgttcaaggctattatggagaagctggagatgagcaagttccagcccactctgctgaccctgcccagaatcaaggtgaccacctctcaggacatgctgagcatcatggaaaagctggagttctttgacttttcttatgacctgaatctgtgtggcctgactgaggatcctgatctgcaggtgtctgccatgcagcaccagactgtgctggagctgactgagactggggtggaggctgctgctgcttctgccatctctgtggccaggaccctgctggtgtttgaggtgcagcagcccttcctgtttgtgctgtgggaccagcagcacaagtttcctgtgttcatgggcagggtgtatgaccccagagcctgaagatctagagctgaattcctgcagccagggggatcagcctctactgtgccttctagttgccagccatctgttgtttgcccctcccccttgccttccttgaccctggaaggtgccactcccactgtcctttcctaataaaatgaggaaattgcatcacattgtctgagtaggtgtcattctattctggggggtggggtggggcaggacagcaagggggaggattgggaagacaatagcaggcatgctggggatgcagtgggctctatggcttctgaggcagaaagaaccagctggggctcgagatccactagggccgcaggaacccctagtgatggagttggccactccctctctgcgcgctcgctcgctcactgaggccgggcgaccaaaggtcgcccgacgcccgggctttgcccgggcggcctcagtgagcgagcgagcgcgcag

SEQ ID NO: 23 - DNA, 3352 bp, Artificial Sequence
  pAAV_ApoE_hAAT_HBB2m1_SERPING1coI24_BGH228
ctgcgcgctcgctcgctcactgaggccgcccgggcaaagcccgggcggcctcagtgagcgagcgagcgcgcagagagggagtggccaactccatcactaggggttcctgcggcctagtaggctcagaggcacacaggagtttctgggctcaccctgcccccttccaacccctcagttcccatcctccagcagctgtttgtgtgctgcctctgaagtccacactgaacaaacttcagcctactcatgtccctaaaatgggcaaacattgcaagcagcaaacagcaaacacacagccctccctgcctgctgaccttggagctggggcagaggtcagagacctctctgggcccatgccacctccaacatccactcgaccccttggaatttcggtggagaggagcagaggttgtcctggcgtggtttaggtagtgtgagaggggtacccggggatcttgctaccagtggaacagccactaaggattctgcagtgagagcagagggccagctaagtggtactctcccagagactgtctgactcacgccaccccctccaccttggacacaggacgctgtggtttctgagccaggtacaatgactcctttcggtaagtgcagtggaagctgtacactgcccaggcaaagcgtccgggcagcgtaggcgggcgactcagatcccagccagtggacttagcccctgtttgctcctccgataactggggtgaccttggttaatattcaccagcagcctcccccgttgcccctctggatccactgcttaaatacggacgaggacagggccctgtctcctcagcttcaggcaccaccactgacctgggacagtgaatagatcctgagaacttcagggtgagtctatgggacccttgatgttttctttccccttcttttctatggttaagttcatgtcataggaaggggagaagtaacagggtacacatattgaccaaatcagggtaattttgcatttgtaattttaaaaaatgctttcttcttttaatatacttttttgtttatcttatttctaatactttccctaatctctttctttcagggcaataatgatacaatgtatcatgcctctttgcaccattctaaagaataacagtgataatttctgggttaaggcaatagcaatatttctgcatataaatatttctgcatataaattgtaactgatgtaagaggtttcatattgctaatagcagctacaatccagctaccattctgcttttattttctggttgggataaggctggattattctgagtccaagctaggcccttttgctaatcttgttcatacctcttatcttcctcccacagctcctgggcaacctgctggtctctctgctggcccatcactttggcaaagcacgcgtgccaccatggctagcaggctgaccctgctgaccctgctgctcctgctgctggctggggacagggcctctagcaatcccaatgccacctctagctctagccaggatcctgagagcctgcaggacaggggggagggcaaggtggccaccactgtgatcagcaagatgctgtttgtggagcccattctggaggtgtcttctctgcccaccaccaatagcaccactaattctgccaccaagatcactgctaacaccactgatgagcccaccactcagcctaccactgagcccaccacccagcccactatccagcccacccagcccaccacccagctgcctactgacagccctacccagcccactactgggagcttctgccctggccctgtgaccctgtgctctgacctggagagccacagcactgaggctgtgctgggggatgccctggtggacttcagcctgaagctgtaccatgccttttctgccatgaagaaggtggagaccaacatggcctttagccctttcagcattgccagcctgctgactcaggtgctgctgggggctggggagaacaccaagaccaacctggagagcatcctgagctaccccaaggacttcacttgtgtgcaccaggccctgaagggcttcactaccaagggggtgacttctgtgagccagatcttccacagccctgacctggccatcagggatacttttgtgaatgccagcaggaccctgtacagcagcagccccagggtgctgagcaacaactctgatgctaacctggagctgatcaatacttgggtggccaagaacaccaacaacaagatttctaggctgctggactctctgccctctgacactaggctggtgctgctgaatgccatctacctgtctgccaagtggaagaccacctttgatcccaagaagactaggatggagcccttccacttcaagaactctgtgatcaaggtgcccatgatgaacagcaagaagtaccctgtggcccatttcattgaccagaccctgaaggccaaggtggggcagctgcagctgagccacaatctgagcctggtgattctggtgccccagaatctgaagcacagactggaggacatggagcaggctctgtctccctctgtgttcaaggccatcatggagaagctggagatgagcaagttccagcccactctgctgactctgcctaggatcaaggtgaccaccagccaggacatgctgagcattatggagaagctggagttctttgacttcagctatgacctgaacctgtgtggcctgactgaggaccctgatctgcaggtgtctgccatgcagcaccagactgtgctggagctgactgagactggggtggaggctgctgctgcctctgctatttctgtggccaggaccctgctggtgtttgaggtgcagcagcccttcctgtttgtgctgtgggaccagcagcacaagtttcctgtgttcatggggagggtgtatgaccccagggcctgaagatctagagctgaattcctgcagccagggggatcagcctctactgtgccttctagttgccagccatctgttgtttgcccctcccccttgccttccttgaccctggaaggtgccactcccactgtcctttcctaataaaatgaggaaattgcatcacattgtctgagtaggtgtcattctattctggggggtggggtggggcaggacagcaagggggaggattgggaagacaatagcaggcatgctggggatgcagtgggctctatggcttctgaggcagaaagaaccagctggggctcgagatccactagggccgcaggaacccctagtgatggagttggccactccctctctgcgcgctcgctcgctcactgaggccgggcgaccaaaggtcgcccgacgcccgggctttgcccgggcggcctcagtgagcgagcgagcgcgcag

SEQ ID NO: 24 - DNA, 3352 bp, Artificial Sequence
  pAAV_ApoE_hAAT_HBB2m1_SERPING1coH9_BGH228
ctgcgcgctcgctcgctcactgaggccgcccgggcaaagcccgggcggcctcagtgagcgagcgagcgcgcagagagggagtggccaactccatcactaggggttcctgcggcctagtaggctcagaggcacacaggagtttctgggctcaccctgcccccttccaacccctcagttcccatcctccagcagctgtttgtgtgctgcctctgaagtccacactgaacaaacttcagcctactcatgtccctaaaatgggcaaacattgcaagcagcaaacagcaaacacacagccctccctgcctgctgaccttggagctggggcagaggtcagagacctctctgggcccatgccacctccaacatccactcgaccccttggaatttcggtggagaggagcagaggttgtcctggcgtggtttaggtagtgtgagaggggtacccggggatcttgctaccagtggaacagccactaaggattctgcagtgagagcagagggccagctaagtggtactctcccagagactgtctgactcacgccaccccctccaccttggacacaggacgctgtggtttctgagccaggtacaatgactcctttcggtaagtgcagtggaagctgtacactgcccaggcaaagcgtccgggcagcgtaggcgggcgactcagatcccagccagtggacttagcccctgtttgctcctccgataactggggtgaccttggttaatattcaccagcagcctcccccgttgcccctctggatccactgcttaaatacggacgaggacagggccctgtctcctcagcttcaggcaccaccactgacctgggacagtgaatagatcctgagaacttcagggtgagtctatgggacccttgatgttttctttccccttcttttctatggttaagttcatgtcataggaaggggagaagtaacagggtacacatattgaccaaatcagggtaattttgcatttgtaattttaaaaaatgctttcttcttttaatatacttttttgtttatcttatttctaatactttccctaatctctttctttcagggcaataatgatacaatgtatcatgcctctttgcaccattctaaagaataacagtgataatttctgggttaaggcaatagcaatatttctgcatataaatatttctgcatataaattgtaactgatgtaagaggtttcatattgctaatagcagctacaatccagctaccattctgcttttattttctggttgggataaggctggattattctgagtccaagctaggcccttttgctaatcttgttcatacctcttatcttcctcccacagctcctgggcaacctgctggtctctctgctggcccatcactttggcaaagcacgcgtgccaccatggcctccaggctgaccctgctgaccctcctgctgctcctgctggctggggatagagcctctagcaatccaaatgctaccagctcctcctcccaggatcctgaatcccttcaagacaggggggagggcaaggtggcaactactgtgatttccaagatgctgtttgtggagcccatcctggaggttagcagccttcctactaccaactcaacaaccaattcagccaccaaaattacagctaataccacagatgagccaacaactcaacccaccactgagcccaccactcagccaaccatccaacccacccaaccaactacccagctcccaacagattctcctacccagcctaccactggctccttctgcccaggacctgttactctctgctctgacttggaaagccattctactgaggctgtcctgggggatgctttggtagacttctccctgaagctctaccatgcattttcagcaatgaagaaggtggagaccaacatggccttttccccattcagtatagcaagtctcctgactcaggtcctgctgggggcaggggagaatacaaagaccaacctggagagcatcctcagttatcccaaggacttcacctgtgtccaccaggccctgaagggcttcacaacaaagggggtgacctcagtctctcagattttccacagcccagacctggccataagggacacctttgtgaatgcctctaggaccctgtactcaagctcccccagagtcctaagcaacaacagtgatgcaaatttggagctcatcaacacctgggtggccaagaacaccaacaacaagatcagcaggctgctagacagtctgccaagtgatacaaggcttgtcctcctcaatgctatctacctgagtgccaagtggaagacaacatttgatcccaagaaaaccagaatggaaccctttcacttcaaaaactcagttataaaagtgcccatgatgaatagcaagaagtaccctgtggcccatttcattgaccaaactttgaaagccaaggtggggcagctgcagctctcccacaatctgagtctggtaatcctggtaccccagaacctgaaacataggcttgaagacatggaacaggctctcagcccttctgttttcaaggccataatggagaagctggagatgtccaagttccagcccactctcctaacactacccaggatcaaagtgacaaccagccaggatatgctctcaatcatggagaaattggaattttttgatttttcttatgaccttaacctgtgtgggctgacagaggaccctgatcttcaggtttctgcaatgcagcaccagacagtgctggaactgacagagactggggtggaagctgctgcagcaagtgcaatatctgtggccagaaccctgctggtctttgaagtgcagcagcccttcctgtttgtgctgtgggaccagcagcacaagttccctgtcttcatggggagggtatatgaccccagggcctgaagatctagagctgaattcctgcagccagggggatcagcctctactgtgccttctagttgccagccatctgttgtttgcccctcccccttgccttccttgaccctggaaggtgccactcccactgtcctttcctaataaaatgaggaaattgcatcacattgtctgagtaggtgtcattctattctggggggtggggtggggcaggacagcaagggggaggattgggaagacaatagcaggcatgctggggatgcagtgggctctatggcttctgaggcagaaagaaccagctggggctcgagatccactagggccgcaggaacccctagtgatggagttggccactccctctctgcgcgctcgctcgctcactgaggccgggcgaccaaaggtcgcccgacgcccgggctttgcccgggcggcctcagtgagcgagcgagcgcgcag

SEQ ID NO: 25 - DNA, 3352 bp, Artificial Sequence
  pAAV_ApoE_hAAT_HBB2m1_SERPING1coH13_BGH228
ctgcgcgctcgctcgctcactgaggccgcccgggcaaagcccgggcggcctcagtgagcgagcgagcgcgcagagagggagtggccaactccatcactaggggttcctgcggcctagtaggctcagaggcacacaggagtttctgggctcaccctgcccccttccaacccctcagttcccatcctccagcagctgtttgtgtgctgcctctgaagtccacactgaacaaacttcagcctactcatgtccctaaaatgggcaaacattgcaagcagcaaacagcaaacacacagccctccctgcctgctgaccttggagctggggcagaggtcagagacctctctgggcccatgccacctccaacatccactcgaccccttggaatttcggtggagaggagcagaggttgtcctggcgtggtttaggtagtgtgagaggggtacccggggatcttgctaccagtggaacagccactaaggattctgcagtgagagcagagggccagctaagtggtactctcccagagactgtctgactcacgccaccccctccaccttggacacaggacgctgtggtttctgagccaggtacaatgactcctttcggtaagtgcagtggaagctgtacactgcccaggcaaagcgtccgggcagcgtaggcgggcgactcagatcccagccagtggacttagcccctgtttgctcctccgataactggggtgaccttggttaatattcaccagcagcctcccccgttgcccctctggatccactgcttaaatacggacgaggacagggccctgtctcctcagcttcaggcaccaccactgacctgggacagtgaatagatcctgagaacttcagggtgagtctatgggacccttgatgttttctttccccttcttttctatggttaagttcatgtcataggaaggggagaagtaacagggtacacatattgaccaaatcagggtaattttgcatttgtaattttaaaaaatgctttcttcttttaatatacttttttgtttatcttatttctaatactttccctaatctctttctttcagggcaataatgatacaatgtatcatgcctctttgcaccattctaaagaataacagtgataatttctgggttaaggcaatagcaatatttctgcatataaatatttctgcatataaattgtaactgatgtaagaggtttcatattgctaatagcagctacaatccagctaccattctgcttttattttctggttgggataaggctggattattctgagtccaagctaggcccttttgctaatcttgttcatacctcttatcttcctcccacagctcctgggcaacctgctggtctctctgctggcccatcactttggcaaagcacgcgtgccaccatggcctccaggctgaccctgctcaccctcctgctgctcctgctggctggggacagggcctccagcaaccccaatgcaaccagcagttcctctcaggatccagagtccctgcaggacaggggggagggcaaggtggccaccactgtgatctccaagatgctgtttgtggagcccatcctggaggtatccagcctccctaccaccaacagcaccaccaactcagccaccaaaatcactgctaacaccactgatgagcccacaacccagccaactactgagccaaccactcagcctaccatccaacccacccagcctactacccagctccccactgactctcctacccagcccaccactggcagcttctgcccaggacctgtgaccctctgctctgacttggagtcccattccacagaggcagtgctgggggatgccctggtagacttctccctgaagctctaccatgcattctctgccatgaagaaggtggagaccaacatggccttctcccccttcagcattgccagcctcctgacccaggtcctgctgggggcaggggagaacacaaagacaaacctggagtccatcctcagctaccccaaggacttcacctgtgtccaccaggccctgaagggcttcacaaccaagggggtgaccagtgtctcacagattttccacagcccagacctggccatcagggacacctttgtgaatgccagtaggaccctgtacagctccagtcccagagtcctcagcaacaactctgatgccaacctggagctgatcaacacctgggtggccaagaacaccaacaacaagatcagcaggctgctagactcactgccctctgacacaaggctggtcctcctcaatgcaatctacctgagtgccaagtggaagaccacctttgaccccaagaagaccaggatggagcccttccacttcaagaacagtgtcattaaggtgcccatgatgaacagcaagaagtaccctgtggcccacttcattgaccagaccttgaaggccaaggtggggcagctgcagctctcccacaacctgtcactggtcatcctggttccccagaacctgaagcacaggcttgaggacatggagcaggccctcagcccttctgtattcaaggccataatggagaagctggagatgagcaagttccagcccactctgctgaccctacccaggatcaaggtgaccaccagccaggacatgctctcaatcatggagaagttggagttctttgacttcagctatgacctgaacctgtgtgggctgacagaggaccctgacctgcaggtgtcagccatgcagcaccagacagtgctggaactgacagagactggggtggaagctgctgcagcaagtgctatttcagtggccaggaccctgctggtctttgaggtccagcagcccttcctgtttgtgctctgggaccagcagcacaagttccctgtcttcatggggagggtctatgaccccagggcctgaagatctagagctgaattcctgcagccagggggatcagcctctactgtgccttctagttgccagccatctgttgtttgcccctcccccttgccttccttgaccctggaaggtgccactcccactgtcctttcctaataaaatgaggaaattgcatcacattgtctgagtaggtgtcattctattctggggggtggggtggggcaggacagcaagggggaggattgggaagacaatagcaggcatgctggggatgcagtgggctctatggcttctgaggcagaaagaaccagctggggctcgagatccactagggccgcaggaacccctagtgatggagttggccactccctctctgcgcgctcgctcgctcactgaggccgggcgaccaaaggtcgcccgacgcccgggctttgcccgggcggcctcagtgagcgagcgagcgcgcag

SEQ ID NO: 26 - DNA, 3352 bp, Artificial Sequence
  pAAV_ApoE_hAAT_HBB2m1_SERPING1coBC2_BGH228
ctgcgcgctcgctcgctcactgaggccgcccgggcaaagcccgggcggcctcagtgagcgagcgagcgcgcagagagggagtggccaactccatcactaggggttcctgcggcctagtaggctcagaggcacacaggagtttctgggctcaccctgcccccttccaacccctcagttcccatcctccagcagctgtttgtgtgctgcctctgaagtccacactgaacaaacttcagcctactcatgtccctaaaatgggcaaacattgcaagcagcaaacagcaaacacacagccctccctgcctgctgaccttggagctggggcagaggtcagagacctctctgggcccatgccacctccaacatccactcgaccccttggaatttcggtggagaggagcagaggttgtcctggcgtggtttaggtagtgtgagaggggtacccggggatcttgctaccagtggaacagccactaaggattctgcagtgagagcagagggccagctaagtggtactctcccagagactgtctgactcacgccaccccctccaccttggacacaggacgctgtggtttctgagccaggtacaatgactcctttcggtaagtgcagtggaagctgtacactgcccaggcaaagcgtccgggcagcgtaggcgggcgactcagatcccagccagtggacttagcccctgtttgctcctccgataactggggtgaccttggttaatattcaccagcagcctcccccgttgcccctctggatccactgcttaaatacggacgaggacagggccctgtctcctcagcttcaggcaccaccactgacctgggacagtgaatagatcctgagaacttcagggtgagtctatgggacccttgatgttttctttccccttcttttctatggttaagttcatgtcataggaaggggagaagtaacagggtacacatattgaccaaatcagggtaattttgcatttgtaattttaaaaaatgctttcttcttttaatatacttttttgtttatcttatttctaatactttccctaatctctttctttcagggcaataatgatacaatgtatcatgcctctttgcaccattctaaagaataacagtgataatttctgggttaaggcaatagcaatatttctgcatataaatatttctgcatataaattgtaactgatgtaagaggtttcatattgctaatagcagctacaatccagctaccattctgcttttattttctggttgggataaggctggattattctgagtccaagctaggcccttttgctaatcttgttcatacctcttatcttcctcccacagctcctgggcaacctgctggtctctctgctggcccatcactttggcaaagcacgcgtgccaccatggcctccaggctgaccctgctgaccctcctgctgctcctgctggctggggacagagccagcagcaaccccaatgccaccagctccagctctcaggacccagagagcctgcaggacaggggggagggcaaggtggccaccacagtgatcagcaagatgctgtttgtggagcccatcctggaggtgagcagcctccccaccaccaacagcaccaccaattctgccaccaagatcacagccaacaccacagatgagcccacaacccagcctaccacagagccaaccacacagcccaccatccaacccacccaacctactacccagctgcccacagacagccctacccagcctaccacaggcagcttctgccctggccctgtgaccctgtgctctgacttggagagccactccacagaggctgtgctgggggatgccctggtggatttcagcctgaagctgtaccatgccttctctgccatgaagaaggtggagaccaacatggccttcagccccttcagcattgccagcctcctgacccaggtcctgctgggggctggggagaacacaaagaccaacctggagagcatcctgagctaccccaaggacttcacctgtgtgcaccaggccctgaagggcttcaccaccaagggggtgacctctgtgagccagattttccacagccctgacctggccatcagggacacctttgtgaatgcctccaggaccctgtacagctctagccccagggtgctgagcaacaactctgatgccaacttggagctgatcaacacctgggtggccaagaacaccaacaacaagatcagcaggctgctggacagcctgccctctgacaccaggctggtgctcctgaatgccatctacctgtctgccaagtggaagaccacctttgaccccaagaagaccagaatggagcccttccacttcaagaactctgtgataaaggtgcccatgatgaacagcaagaagtaccctgtggcccacttcattgaccagaccctgaaagccaaggtgggccagctgcagctcagccacaacctgagcctggtcatcctggtgccccagaacctgaagcacaggctggaggacatggaacaggccctcagcccctctgtgttcaaggccattatggagaagctggagatgagcaagttccagcccactctgctgacactgcccaggatcaaggtgaccaccagccaggacatgctgagcatcatggagaagttggagttctttgacttcagctatgacctgaacctgtgtggcctgacagaggaccctgacctccaggtgtctgccatgcagcaccagacagtgctggaactgacagagacaggggtggaagctgctgctgcctctgccatctctgtggccagaaccctgctggtgtttgaggtgcagcagcccttcctgtttgtgctgtgggaccagcagcacaagttccctgtgttcatgggcagggtgtatgaccccagggcctgaagatctagagctgaattcctgcagccagggggatcagcctctactgtgccttctagttgccagccatctgttgtttgcccctcccccttgccttccttgaccctggaaggtgccactcccactgtcctttcctaataaaatgaggaaattgcatcacattgtctgagtaggtgtcattctattctggggggtggggtggggcaggacagcaagggggaggattgggaagacaatagcaggcatgctggggatgcagtgggctctatggcttctgaggcagaaagaaccagctggggctcgagatccactagggccgcaggaacccctagtgatggagttggccactccctctctgcgcgctcgctcgctcactgaggccgggcgaccaaaggtcgcccgacgcccgggctttgcccgggcggcctcagtgagcgagcgagcgcgcag

SEQ ID NO: 27 - DNA, 3352 bp, Artificial Sequence
  pAAV_ApoE_hAAT_HBB2m1_SERPING1coI21(-RIDD)_BGH228
ctgcgcgctcgctcgctcactgaggccgcccgggcaaagcccgggcggcctcagtgagcgagcgagcgcgcagagagggagtggccaactccatcactaggggttcctgcggcctagtaggctcagaggcacacaggagtttctgggctcaccctgcccccttccaacccctcagttcccatcctccagcagctgtttgtgtgctgcctctgaagtccacactgaacaaacttcagcctactcatgtccctaaaatgggcaaacattgcaagcagcaaacagcaaacacacagccctccctgcctgctgaccttggagctggggcagaggtcagagacctctctgggcccatgccacctccaacatccactcgaccccttggaatttcggtggagaggagcagaggttgtcctggcgtggtttaggtagtgtgagaggggtacccggggatcttgctaccagtggaacagccactaaggattctgcagtgagagcagagggccagctaagtggtactctcccagagactgtctgactcacgccaccccctccaccttggacacaggacgctgtggtttctgagccaggtacaatgactcctttcggtaagtgcagtggaagctgtacactgcccaggcaaagcgtccgggcagcgtaggcgggcgactcagatcccagccagtggacttagcccctgtttgctcctccgataactggggtgaccttggttaatattcaccagcagcctcccccgttgcccctctggatccactgcttaaatacggacgaggacagggccctgtctcctcagcttcaggcaccaccactgacctgggacagtgaatagatcctgagaacttcagggtgagtctatgggacccttgatgttttctttccccttcttttctatggttaagttcatgtcataggaaggggagaagtaacagggtacacatattgaccaaatcagggtaattttgcatttgtaattttaaaaaatgctttcttcttttaatatacttttttgtttatcttatttctaatactttccctaatctctttctttcagggcaataatgatacaatgtatcatgcctctttgcaccattctaaagaataacagtgataatttctgggttaaggcaatagcaatatttctgcatataaatatttctgcatataaattgtaactgatgtaagaggtttcatattgctaatagcagctacaatccagctaccattctgcttttattttctggttgggataaggctggattattctgagtccaagctaggcccttttgctaatcttgttcatacctcttatcttcctcccacagctcctgggcaacctgctggtctctctgctggcccatcactttggcaaagcacgcgtgccaccatggcctctaggctgactctgctgactctgctgctcctgctgctggctggggacagggccagctctaaccccaatgctacttctagctcctctcaggaccctgagagccttcaggacaggggggagggcaaggtggccaccactgtgatctctaagatgctgtttgtggagcccatcctggaggtgagcagcctgcccaccaccaacagcaccaccaactctgccactaagatcactgccaacaccactgatgagcccaccacccagcccactactgagcccaccacccagcctactatccagcccacccagcccactacccagctgcccactgacagccctacccagcccaccactggcagcttctgccctgggcctgtgaccctgtgctctgacctggagagccattctactgaggctgtgctgggggatgccctggtggacttctctctgaagctgtaccatgctttctctgccatgaagaaggtggagactaacatggcttttagccccttcagcattgctagcctgctgacccaggtgctgctgggggctggggagaacactaagaccaacctggaatctatcctgagctaccccaaggacttcacctgtgtgcaccaggccctgaagggcttcaccaccaagggggtgacctctgtgagccagatcttccacagccctgacctggccatcagggatacttttgtgaatgccagcagaaccctgtactcttctagccccagggtgctgagcaataattctgatgctaacctggagctgatcaatacctgggtggctaagaataccaacaacaagattagcaggctgctggactctctgccttctgataccaggctggtgctgctgaatgccatttacctgtctgccaagtggaagaccacttttgaccctaagaagactaggatggagcctttccacttcaagaactctgtcattaaggtgcccatgatgaacagcaagaagtatcctgtggcccactttattgaccagactctgaaggccaaggtgggccagcttcagctgagccataacctgagcctggtgatcctggtgccccagaacctgaagcataggctggaggacatggagcaggctctgagcccctctgtgttcaaggctattatggagaagctggagatgagcaagttccagcccactctgctgaccctgcccagaatcaaggtgaccacctctcaggacatgctgagcatcatggaaaagctggagttctttgacttttcttatgacctgaatctgtgtggcctgactgaggatcctgatcttcaggtgtctgccatgcagcaccagactgtgctggagctgactgagactggggtggaggctgctgctgcttctgccatctctgtggccaggaccctgctggtgtttgaggtgcagcagcccttcctgtttgtgctgtgggaccagcagcacaagtttcctgtgttcatgggcagggtgtatgaccccagagcctgaagatctagagctgaattccttcagccagggggatcagcctctactgtgccttctagttgccagccatctgttgtttgcccctcccccttgccttccttgaccctggaaggtgccactcccactgtcctttcctaataaaatgaggaaattgcatcacattgtctgagtaggtgtcattctattctggggggtggggtggggcaggacagcaagggggaggattgggaagacaatagcaggcatgctggggatgcagtgggctctatggcttctgaggcagaaagaaccagctggggctcgagatccactagggccgcaggaacccctagtgatggagttggccactccctctctgcgcgctcgctcgctcactgaggccgggcgaccaaaggtcgcccgacgcccgggctttgcccgggcggcctcagtgagcgagcgagcgcgcag

SEQ ID NO: 28 - DNA, 3354 bp, Artificial Sequence
  pSwap_ApoE_hAAT_HBB2m1_SERPING1coI21_BGH228
ctgcgcgctcgctcgctcactgaggccgcccgggcaaagcccgggcggcctcagtgagcgagcgagcgcgcagagagggagtggccaactccatcactaggggttcctgcggcctagtactaggctcagaggcacacaggagtttctgggctcaccctgcccccttccaacccctcagttcccatcctccagcagctgtttgtgtgctgcctctgaagtccacactgaacaaacttcagcctactcatgtccctaaaatgggcaaacattgcaagcagcaaacagcaaacacacagccctccctgcctgctgaccttggagctggggcagaggtcagagacctctctgggcccatgccacctccaacatccactcgaccccttggaatttcggtggagaggagcagaggttgtcctggcgtggtttaggtagtgtgagaggggtacccggggatcttgctaccagtggaacagccactaaggattctgcagtgagagcagagggccagctaagtggtactctcccagagactgtctgactcacgccaccccctccaccttggacacaggacgctgtggtttctgagccaggtacaatgactcctttcggtaagtgcagtggaagctgtacactgcccaggcaaagcgtccgggcagcgtaggcgggcgactcagatcccagccagtggacttagcccctgtttgctcctccgataactggggtgaccttggttaatattcaccagcagcctcccccgttgcccctctggatccactgcttaaatacggacgaggacagggccctgtctcctcagcttcaggcaccaccactgacctgggacagtgaatagatcttgagaacttcagggtgagtctatgggacccttgatgttttctttccccttcttttctatggttaagttcatgtcataggaaggggagaagtaacagggtacacatattgaccaaatcagggtaattttgcatttgtaattttaaaaaatgctttcttcttttaatatacttttttgtttatcttatttctaatactttccctaatctctttctttcagggcaataatgatacaatgtatcatgcctctttgcaccattctaaagaataacagtgataatttctgggttaaggcaatagcaatatttctgcatataaatatttctgcatataaattgtaactgatgtaagaggtttcatattgctaatagcagctacaatccagctaccattctgcttttattttctggttgggataaggctggattattctgagtccaagctaggcccttttgctaatcttgttcatacctcttatcttcctcccacagctcctgggcaacctgctggtctctctgctggcccatcactttggcaaagcactagtgccaccatggcctctaggctgactctgctgactctgctgctcctgctgctggctggggacagggccagctctaaccccaatgctacttctagctcctctcaggaccctgagagcctgcaggacaggggggagggcaaggtggccaccactgtgatctctaagatgctgtttgtggagcccatcctggaggtgagcagcctgcccaccaccaacagcaccaccaactctgccactaagatcactgccaacaccactgatgagcccaccacccagcccactactgagcccaccacccagcctactatccagcccacccagcccactacccagctgcccactgacagccctacccagcccaccactggcagcttctgccctgggcctgtgaccctgtgctctgacctggagagccattctactgaggctgtgctgggggatgccctggtggacttctctctgaagctgtaccatgctttctctgccatgaagaaggtggagactaacatggcttttagccccttcagcattgctagcctgctgacccaggtgctgctgggggctggggagaacactaagaccaacctggaatctatcctgagctaccccaaggacttcacctgtgtgcaccaggccctgaagggcttcaccaccaagggggtgacctctgtgagccagatcttccacagccctgacctggccatcagggatacttttgtgaatgccagcagaaccctgtactcttctagccccagggtgctgagcaataattctgatgctaacctggagctgatcaatacctgggtggctaagaataccaacaacaagattagcaggctgctggactctctgccttctgataccaggctggtgctgctgaatgccatttacctgtctgccaagtggaagaccacttttgaccctaagaagactaggatggagcctttccacttcaagaactctgtcattaaggtgcccatgatgaacagcaagaagtatcctgtggcccactttattgaccagactctgaaggccaaggtgggccagctgcagctgagccataacctgagcctggtgatcctggtgccccagaacctgaagcataggctggaggacatggagcaggctctgagcccctctgtgttcaaggctattatggagaagctggagatgagcaagttccagcccactctgctgaccctgcccagaatcaaggtgaccacctctcaggacatgctgagcatcatggaaaagctggagttctttgacttttcttatgacctgaatctgtgtggcctgactgaggatcctgatctgcaggtgtctgccatgcagcaccagactgtgctggagctgactgagactggggtggaggctgctgctgcttctgccatctctgtggccaggaccctgctggtgtttgaggtgcagcagcccttcctgtttgtgctgtgggaccagcagcacaagtttcctgtgttcatgggcagggtgtatgaccccagagcctgacatctagagctgaattcctgcagccagggggatcagcctctactgtgccttctagttgccagccatctgttgtttgcccctcccccttgccttccttgaccctggaaggtgccactcccactgtcctttcctaataaaatgaggaaattgcatcacattgtctgagtaggtgtcattctattctggggggtggggtggggcaggacagcaagggggaggattgggaagacaatagcaggcatgctggggatgcagtgggctctatggcttctgaggcagaaagaaccagctggggctcgagatccactagggccgcaggaacccctagtgatggagttggccactccctctctgcgcgctcgctcgctcactgaggccgggcgaccaaaggtcgcccgacgcccgggctttgcccgggcggcctcagtgagcgagcgagcgcgcag

SEQ ID NO: 29 - DNA, 3354 bp, Artificial Sequence
  pSwap_ApoE_hAAT_HBB2m1_SERPING1coI24_BGH228
ctgcgcgctcgctcgctcactgaggccgcccgggcaaagcccgggcggcctcagtgagcgagcgagcgcgcagagagggagtggccaactccatcactaggggttcctgcggcctagtactaggctcagaggcacacaggagtttctgggctcaccctgcccccttccaacccctcagttcccatcctccagcagctgtttgtgtgctgcctctgaagtccacactgaacaaacttcagcctactcatgtccctaaaatgggcaaacattgcaagcagcaaacagcaaacacacagccctccctgcctgctgaccttggagctggggcagaggtcagagacctctctgggcccatgccacctccaacatccactcgaccccttggaatttcggtggagaggagcagaggttgtcctggcgtggtttaggtagtgtgagaggggtacccggggatcttgctaccagtggaacagccactaaggattctgcagtgagagcagagggccagctaagtggtactctcccagagactgtctgactcacgccaccccctccaccttggacacaggacgctgtggtttctgagccaggtacaatgactcctttcggtaagtgcagtggaagctgtacactgcccaggcaaagcgtccgggcagcgtaggcgggcgactcagatcccagccagtggacttagcccctgtttgctcctccgataactggggtgaccttggttaatattcaccagcagcctcccccgttgcccctctggatccactgcttaaatacggacgaggacagggccctgtctcctcagcttcaggcaccaccactgacctgggacagtgaatagatcttgagaacttcagggtgagtctatgggacccttgatgttttctttccccttcttttctatggttaagttcatgtcataggaaggggagaagtaacagggtacacatattgaccaaatcagggtaattttgcatttgtaattttaaaaaatgctttcttcttttaatatacttttttgtttatcttatttctaatactttccctaatctctttctttcagggcaataatgatacaatgtatcatgcctctttgcaccattctaaagaataacagtgataatttctgggttaaggcaatagcaatatttctgcatataaatatttctgcatataaattgtaactgatgtaagaggtttcatattgctaatagcagctacaatccagctaccattctgcttttattttctggttgggataaggctggattattctgagtccaagctaggcccttttgctaatcttgttcatacctcttatcttcctcccacagctcctgggcaacctgctggtctctctgctggcccatcactttggcaaagcactagtgccaccatggctagcaggctgaccctgctgaccctgctgctcctgctgctggctggggacagggcctctagcaatcccaatgccacctctagctctagccaggatcctgagagcctgcaggacaggggggagggcaaggtggccaccactgtgatcagcaagatgctgtttgtggagcccattctggaggtgtcttctctgcccaccaccaatagcaccactaattctgccaccaagatcactgctaacaccactgatgagcccaccactcagcctaccactgagcccaccacccagcccactatccagcccacccagcccaccacccagctgcctactgacagccctacccagcccactactgggagcttctgccctggccctgtgaccctgtgctctgacctggagagccacagcactgaggctgtgctgggggatgccctggtggacttcagcctgaagctgtaccatgccttttctgccatgaagaaggtggagaccaacatggcctttagccctttcagcattgccagcctgctgactcaggtgctgctgggggctggggagaacaccaagaccaacctggagagcatcctgagctaccccaaggacttcacttgtgtgcaccaggccctgaagggcttcactaccaagggggtgacttctgtgagccagatcttccacagccctgacctggccatcagggatacttttgtgaatgccagcaggaccctgtacagcagcagccccagggtgctgagcaacaactctgatgctaacctggagctgatcaatacttgggtggccaagaacaccaacaacaagatttctaggctgctggactctctgccctctgacactaggctggtgctgctgaatgccatctacctgtctgccaagtggaagaccacctttgatcccaagaagactaggatggagcccttccacttcaagaactctgtgatcaaggtgcccatgatgaacagcaagaagtaccctgtggcccatttcattgaccagaccctgaaggccaaggtggggcagctgcagctgagccacaatctgagcctggtgattctggtgccccagaatctgaagcacagactggaggacatggagcaggctctgtctccctctgtgttcaaggccatcatggagaagctggagatgagcaagttccagcccactctgctgactctgcctaggatcaaggtgaccaccagccaggacatgctgagcattatggagaagctggagttctttgacttcagctatgacctgaacctgtgtggcctgactgaggaccctgatctgcaggtgtctgccatgcagcaccagactgtgctggagctgactgagactggggtggaggctgctgctgcctctgctatttctgtggccaggaccctgctggtgtttgaggtgcagcagcccttcctgtttgtgctgtgggaccagcagcacaagtttcctgtgttcatggggagggtgtatgaccccagggcctgacatctagagctgaattcctgcagccagggggatcagcctctactgtgccttctagttgccagccatctgttgtttgcccctcccccttgccttccttgaccctggaaggtgccactcccactgtcctttcctaataaaatgaggaaattgcatcacattgtctgagtaggtgtcattctattctggggggtggggtggggcaggacagcaagggggaggattgggaagacaatagcaggcatgctggggatgcagtgggctctatggcttctgaggcagaaagaaccagctggggctcgagatccactagggccgcaggaacccctagtgatggagttggccactccctctctgcgcgctcgctcgctcactgaggccgggcgaccaaaggtcgcccgacgcccgggctttgcccgggcggcctcagtgagcgagcgagcgcgcag

SEQ ID NO: 30 - DNA, 3130 bp, Artificial Sequence
  pAAV_ApoE_hAAT_HBB2m1_ ?76.SERPING1_BGH228
ctgcgcgctcgctcgctcactgaggccgcccgggcaaagcccgggcggcctcagtgagcgagcgagcgcgcagagagggagtggccaactccatcactaggggttcctgcggcctagtaggctcagaggcacacaggagtttctgggctcaccctgcccccttccaacccctcagttcccatcctccagcagctgtttgtgtgctgcctctgaagtccacactgaacaaacttcagcctactcatgtccctaaaatgggcaaacattgcaagcagcaaacagcaaacacacagccctccctgcctgctgaccttggagctggggcagaggtcagagacctctctgggcccatgccacctccaacatccactcgaccccttggaatttcggtggagaggagcagaggttgtcctggcgtggtttaggtagtgtgagaggggtacccggggatcttgctaccagtggaacagccactaaggattctgcagtgagagcagagggccagctaagtggtactctcccagagactgtctgactcacgccaccccctccaccttggacacaggacgctgtggtttctgagccaggtacaatgactcctttcggtaagtgcagtggaagctgtacactgcccaggcaaagcgtccgggcagcgtaggcgggcgactcagatcccagccagtggacttagcccctgtttgctcctccgataactggggtgaccttggttaatattcaccagcagcctcccccgttgcccctctggatccactgcttaaatacggacgaggacagggccctgtctcctcagcttcaggcaccaccactgacctgggacagtgaatagatcctgagaacttcagggtgagtctatgggacccttgatgttttctttccccttcttttctatggttaagttcatgtcataggaaggggagaagtaacagggtacacatattgaccaaatcagggtaattttgcatttgtaattttaaaaaatgctttcttcttttaatatacttttttgtttatcttatttctaatactttccctaatctctttctttcagggcaataatgatacaatgtatcatgcctctttgcaccattctaaagaataacagtgataatttctgggttaaggcaatagcaatatttctgcatataaatatttctgcatataaattgtaactgatgtaagaggtttcatattgctaatagcagctacaatccagctaccattctgcttttattttctggttgggataaggctggattattctgagtccaagctaggcccttttgctaatcttgttcatacctcttatcttcctcccacagctcctgggcaacctgctggtctctctgctggcccatcactttggcaaagcacgcgtgccaccatggcctccaggctgaccctgctgaccctcctgctgctgctgctggctggggatagagcctcctcaaatcccaccatccaacccacccaaccaactacccagctcccaacagattctcctacccagcccactactgggtccttctgcccaggacctgttactctctgctctgacttggagagtcattcaacagaggccgtgttgggggatgctttggtagatttctccctgaagctctaccacgccttctcagcaatgaagaaggtggagaccaacatggccttttccccattcagcatcgccagcctccttacccaggtcctgctcggggctggggagaacaccaaaacaaacctggagagcatcctctcttaccccaaggacttcacctgtgtccaccaggccctgaagggcttcacgaccaaaggtgtcacctcagtctctcagattttccacagcccagacctggccataagggacacctttgtgaatgcctctcggaccctgtacagcagcagccccagagtcctaagcaacaacagtgacgccaacttggagctcatcaacacctgggtggccaagaacaccaacaacaagatcagccggctgctagacagtctgccctccgatacccgccttgtcctcctcaatgctatctacctgagtgccaagtggaagacaacatttgatcccaagaaaaccagaatggaaccctttcacttcaaaaactcagttataaaagtgcccatgatgaatagcaagaagtaccctgtggcccatttcattgaccaaactttgaaagccaaggtggggcagctgcagctctcccacaatctgagtttggtgatcctggtaccccagaacctgaaacatcgtcttgaagacatggaacaggctctcagcccttctgttttcaaggccatcatggagaaactggagatgtccaagttccagcccactctcctaacactaccccgcatcaaagtgacgaccagccaggatatgctctcaatcatggagaaattggaattcttcgatttttcttatgaccttaacctgtgtgggctgacagaggaccctgatcttcaggtttctgcgatgcagcaccagacagtgctggaactgacagagactggggtggaggcggctgcagcctccgccatctctgtggcccgcaccctgctggtctttgaagtgcagcagcccttcctcttcgtgctctgggaccagcagcacaagttccctgtcttcatggggcgagtatatgaccccagggcctgaagatctagagctgaattcctgcagccagggggatcagcctctactgtgccttctagttgccagccatctgttgtttgcccctcccccttgccttccttgaccctggaaggtgccactcccactgtcctttcctaataaaatgaggaaattgcatcacattgtctgagtaggtgtcattctattctggggggtggggtggggcaggacagcaagggggaggattgggaagacaatagcaggcatgctggggatgcagtgggctctatggcttctgaggcagaaagaaccagctggggctcgagatccactagggccgcaggaacccctagtgatggagttggccactccctctctgcgcgctcgctcgctcactgaggccgggcgaccaaaggtcgcccgacgcccgggctttgcccgggcggcctcagtgagcgagcgagcgcgcag

SEQ ID NO: 31 - DNA, 3064 bp, Artificial Sequence
  AAV_ApoE_hAAT_HBB2m1_ ?98.SERPING1_BGH228
ctgcgcgctcgctcgctcactgaggccgcccgggcaaagcccgggcggcctcagtgagcgagcgagcgcgcagagagggagtggccaactccatcactaggggttcctgcggcctagtaggctcagaggcacacaggagtttctgggctcaccctgcccccttccaacccctcagttcccatcctccagcagctgtttgtgtgctgcctctgaagtccacactgaacaaacttcagcctactcatgtccctaaaatgggcaaacattgcaagcagcaaacagcaaacacacagccctccctgcctgctgaccttggagctggggcagaggtcagagacctctctgggcccatgccacctccaacatccactcgaccccttggaatttcggtggagaggagcagaggttgtcctggcgtggtttaggtagtgtgagaggggtacccggggatcttgctaccagtggaacagccactaaggattctgcagtgagagcagagggccagctaagtggtactctcccagagactgtctgactcacgccaccccctccaccttggacacaggacgctgtggtttctgagccaggtacaatgactcctttcggtaagtgcagtggaagctgtacactgcccaggcaaagcgtccgggcagcgtaggcgggcgactcagatcccagccagtggacttagcccctgtttgctcctccgataactggggtgaccttggttaatattcaccagcagcctcccccgttgcccctctggatccactgcttaaatacggacgaggacagggccctgtctcctcagcttcaggcaccaccactgacctgggacagtgaatagatcctgagaacttcagggtgagtctatgggacccttgatgttttctttccccttcttttctatggttaagttcatgtcataggaaggggagaagtaacagggtacacatattgaccaaatcagggtaattttgcatttgtaattttaaaaaatgctttcttcttttaatatacttttttgtttatcttatttctaatactttccctaatctctttctttcagggcaataatgatacaatgtatcatgcctctttgcaccattctaaagaataacagtgataatttctgggttaaggcaatagcaatatttctgcatataaatatttctgcatataaattgtaactgatgtaagaggtttcatattgctaatagcagctacaatccagctaccattctgcttttattttctggttgggataaggctggattattctgagtccaagctaggcccttttgctaatcttgttcatacctcttatcttcctcccacagctcctgggcaacctgctggtctctctgctggcccatcactttggcaaagcacgcgtgccaccatggcctccaggctgaccctgctgaccctcctgctgctgctgctggctggggatagagcctcctcaaatgggtccttctgcccaggacctgttactctctgctctgacttggagagtcattcaacagaggccgtgttgggggatgctttggtagatttctccctgaagctctaccacgccttctcagcaatgaagaaggtggagaccaacatggccttttccccattcagcatcgccagcctccttacccaggtcctgctcggggctggggagaacaccaaaacaaacctggagagcatcctctcttaccccaaggacttcacctgtgtccaccaggccctgaagggcttcacgaccaaaggtgtcacctcagtctctcagattttccacagcccagacctggccataagggacacctttgtgaatgcctctcggaccctgtacagcagcagccccagagtcctaagcaacaacagtgacgccaacttggagctcatcaacacctgggtggccaagaacaccaacaacaagatcagccggctgctagacagtctgccctccgatacccgccttgtcctcctcaatgctatctacctgagtgccaagtggaagacaacatttgatcccaagaaaaccagaatggaaccctttcacttcaaaaactcagttataaaagtgcccatgatgaatagcaagaagtaccctgtggcccatttcattgaccaaactttgaaagccaaggtggggcagctgcagctctcccacaatctgagtttggtgatcctggtaccccagaacctgaaacatcgtcttgaagacatggaacaggctctcagcccttctgttttcaaggccatcatggagaaactggagatgtccaagttccagcccactctcctaacactaccccgcatcaaagtgacgaccagccaggatatgctctcaatcatggagaaattggaattcttcgatttttcttatgaccttaacctgtgtgggctgacagaggaccctgatcttcaggtttctgcgatgcagcaccagacagtgctggaactgacagagactggggtggaggcggctgcagcctccgccatctctgtggcccgcaccctgctggtctttgaagtgcagcagcccttcctcttcgtgctctgggaccagcagcacaagttccctgtcttcatggggcgagtatatgaccccagggcctgaagatctagagctgaattcctgcagccagggggatcagcctctactgtgccttctagttgccagccatctgttgtttgcccctcccccttgccttccttgaccctggaaggtgccactcccactgtcctttcctaataaaatgaggaaattgcatcacattgtctgagtaggtgtcattctattctggggggtggggtggggcaggacagcaagggggaggattgggaagacaatagcaggcatgctggggatgcagtgggctctatggcttctgaggcagaaagaaccagctggggctcgagatccactagggccgcaggaacccctagtgatggagttggccactccctctctgcgcgctcgctcgctcactgaggccgggcgaccaaaggtcgcccgacgcccgggctttgcccgggcggcctcagtgagcgagcgagcgcgcag

SEQ ID NO: 32 - DNA, 3349 bp, Artificial Sequence
  pSwap_ApoE_hAATv18_HBB2m1_SERPING1coI21_BGH228
ctgcgcgctcgctcgctcactgaggccgcccgggcaaagcccgggcggcctcagtgagcgagcgagcgcgcagagagggagtggccaactccatcactaggggttcctgcggcctagtactaggctcagaggcacacaggagtttctgggctcaccctgcccccttccaacccctcagttcccatcctccagcagctgtttgtgtgctgcctctgaagtccacactgaacaaacttcagcctactcatgtccctaaaatgggcaaacattgcaagcagcaaacagcaaacacacagccctccctgcctgctgaccttggagctggggcagaggtcagagacctctctgggcccatgccacctccaacatccacttgaccccttggaattttggtggagaggagcagaggttgtcctggtgtggtttaggtagtgtgagaggggtacctggggatcttgctaccagtggaacagccactaaggattctgcagtgagagcagagggccagctaagtggtactctcccagagactgtctgactcagccaccccctccaccttggacacaggatgctgtggtttctgagccaggtacaatgactcctttggtaagtgcagtggaagctgtacactgcccaggcaaaggtctgggcaggtagggggtgactcagatcccagccagtggacttagcccctgtttgctcctctgataactggggtgaccttggttaatattcaccagcagcctcccctgttgcccctctggatccactgcttaaatatggatgaggacagggccctgtctcctcagcttcaggcaccaccactgacctgggacagtgaatagatcttgagaacttcagggtgagtctatgggacccttgatgttttctttccccttcttttctatggttaagttcatgtcataggaaggggagaagtaacagggtacacatattgaccaaatcagggtaattttgcatttgtaattttaaaaaatgctttcttcttttaatatacttttttgtttatcttatttctaatactttccctaatctctttctttcagggcaataatgatacaatgtatcatgcctctttgcaccattctaaagaataacagtgataatttctgggttaaggcaatagcaatatttctgcatataaatatttctgcatataaattgtaactgatgtaagaggtttcatattgctaatagcagctacaatccagctaccattctgcttttattttctggttgggataaggctggattattctgagtccaagctaggcccttttgctaatcttgttcatacctcttatcttcctcccacagctcctgggcaacctgctggtctctctgctggcccatcactttggcaaagcactagtgccaccatggcctctaggctgactctgctgactctgctgctcctgctgctggctggggacagggccagctctaaccccaatgctacttctagctcctctcaggaccctgagagcctgcaggacaggggggagggcaaggtggccaccactgtgatctctaagatgctgtttgtggagcccatcctggaggtgagcagcctgcccaccaccaacagcaccaccaactctgccactaagatcactgccaacaccactgatgagcccaccacccagcccactactgagcccaccacccagcctactatccagcccacccagcccactacccagctgcccactgacagccctacccagcccaccactggcagcttctgccctgggcctgtgaccctgtgctctgacctggagagccattctactgaggctgtgctgggggatgccctggtggacttctctctgaagctgtaccatgctttctctgccatgaagaaggtggagactaacatggcttttagccccttcagcattgctagcctgctgacccaggtgctgctgggggctggggagaacactaagaccaacctggaatctatcctgagctaccccaaggacttcacctgtgtgcaccaggccctgaagggcttcaccaccaagggggtgacctctgtgagccagatcttccacagccctgacctggccatcagggatacttttgtgaatgccagcagaaccctgtactcttctagccccagggtgctgagcaataattctgatgctaacctggagctgatcaatacctgggtggctaagaataccaacaacaagattagcaggctgctggactctctgccttctgataccaggctggtgctgctgaatgccatttacctgtctgccaagtggaagaccacttttgaccctaagaagactaggatggagcctttccacttcaagaactctgtcattaaggtgcccatgatgaacagcaagaagtatcctgtggcccactttattgaccagactctgaaggccaaggtgggccagctgcagctgagccataacctgagcctggtgatcctggtgccccagaacctgaagcataggctggaggacatggagcaggctctgagcccctctgtgttcaaggctattatggagaagctggagatgagcaagttccagcccactctgctgaccctgcccagaatcaaggtgaccacctctcaggacatgctgagcatcatggaaaagctggagttctttgacttttcttatgacctgaatctgtgtggcctgactgaggatcctgatctgcaggtgtctgccatgcagcaccagactgtgctggagctgactgagactggggtggaggctgctgctgcttctgccatctctgtggccaggaccctgctggtgtttgaggtgcagcagcccttcctgtttgtgctgtgggaccagcagcacaagtttcctgtgttcatgggcagggtgtatgaccccagagcctgacatctagagctgaattcctgcagccagggggatcagcctctactgtgccttctagttgccagccatctgttgtttgcccctcccccttgccttccttgaccctggaaggtgccactcccactgtcctttcctaataaaatgaggaaattgcatcacattgtctgagtaggtgtcattctattctggggggtggggtggggcaggacagcaagggggaggattgggaagacaatagcaggcatgctggggatgcagtgggctctatggcttctgaggcagaaagaaccagctggggctcgagatccactagggccgcaggaacccctagtgatggagttggccactccctctctgcgcgctcgctcgctcactgaggccgggcgaccaaaggtcgcccgacgcccgggctttgcccgggcggcctcagtgagcgagcgagcgcgcag

SEQ ID NO: 33 - DNA, 3349 bp, Artificial Sequence
  pSwap_ApoE_hAATv18_HBB2m1_SERPING1coI24_BGH228
ctgcgcgctcgctcgctcactgaggccgcccgggcaaagcccgggcggcctcagtgagcgagcgagcgcgcagagagggagtggccaactccatcactaggggttcctgcggcctagtactaggctcagaggcacacaggagtttctgggctcaccctgcccccttccaacccctcagttcccatcctccagcagctgtttgtgtgctgcctctgaagtccacactgaacaaacttcagcctactcatgtccctaaaatgggcaaacattgcaagcagcaaacagcaaacacacagccctccctgcctgctgaccttggagctggggcagaggtcagagacctctctgggcccatgccacctccaacatccacttgaccccttggaattttggtggagaggagcagaggttgtcctggtgtggtttaggtagtgtgagaggggtacctggggatcttgctaccagtggaacagccactaaggattctgcagtgagagcagagggccagctaagtggtactctcccagagactgtctgactcagccaccccctccaccttggacacaggatgctgtggtttctgagccaggtacaatgactcctttggtaagtgcagtggaagctgtacactgcccaggcaaaggtctgggcaggtagggggtgactcagatcccagccagtggacttagcccctgtttgctcctctgataactggggtgaccttggttaatattcaccagcagcctcccctgttgcccctctggatccactgcttaaatatggatgaggacagggccctgtctcctcagcttcaggcaccaccactgacctgggacagtgaatagatcttgagaacttcagggtgagtctatgggacccttgatgttttctttccccttcttttctatggttaagttcatgtcataggaaggggagaagtaacagggtacacatattgaccaaatcagggtaattttgcatttgtaattttaaaaaatgctttcttcttttaatatacttttttgtttatcttatttctaatactttccctaatctctttctttcagggcaataatgatacaatgtatcatgcctctttgcaccattctaaagaataacagtgataatttctgggttaaggcaatagcaatatttctgcatataaatatttctgcatataaattgtaactgatgtaagaggtttcatattgctaatagcagctacaatccagctaccattctgcttttattttctggttgggataaggctggattattctgagtccaagctaggcccttttgctaatcttgttcatacctcttatcttcctcccacagctcctgggcaacctgctggtctctctgctggcccatcactttggcaaagcactagtgccaccatggctagcaggctgaccctgctgaccctgctgctcctgctgctggctggggacagggcctctagcaatcccaatgccacctctagctctagccaggatcctgagagcctgcaggacaggggggagggcaaggtggccaccactgtgatcagcaagatgctgtttgtggagcccattctggaggtgtcttctctgcccaccaccaatagcaccactaattctgccaccaagatcactgctaacaccactgatgagcccaccactcagcctaccactgagcccaccacccagcccactatccagcccacccagcccaccacccagctgcctactgacagccctacccagcccactactgggagcttctgccctggccctgtgaccctgtgctctgacctggagagccacagcactgaggctgtgctgggggatgccctggtggacttcagcctgaagctgtaccatgccttttctgccatgaagaaggtggagaccaacatggcctttagccctttcagcattgccagcctgctgactcaggtgctgctgggggctggggagaacaccaagaccaacctggagagcatcctgagctaccccaaggacttcacttgtgtgcaccaggccctgaagggcttcactaccaagggggtgacttctgtgagccagatcttccacagccctgacctggccatcagggatacttttgtgaatgccagcaggaccctgtacagcagcagccccagggtgctgagcaacaactctgatgctaacctggagctgatcaatacttgggtggccaagaacaccaacaacaagatttctaggctgctggactctctgccctctgacactaggctggtgctgctgaatgccatctacctgtctgccaagtggaagaccacctttgatcccaagaagactaggatggagcccttccacttcaagaactctgtgatcaaggtgcccatgatgaacagcaagaagtaccctgtggcccatttcattgaccagaccctgaaggccaaggtggggcagctgcagctgagccacaatctgagcctggtgattctggtgccccagaatctgaagcacagactggaggacatggagcaggctctgtctccctctgtgttcaaggccatcatggagaagctggagatgagcaagttccagcccactctgctgactctgcctaggatcaaggtgaccaccagccaggacatgctgagcattatggagaagctggagttctttgacttcagctatgacctgaacctgtgtggcctgactgaggaccctgatctgcaggtgtctgccatgcagcaccagactgtgctggagctgactgagactggggtggaggctgctgctgcctctgctatttctgtggccaggaccctgctggtgtttgaggtgcagcagcccttcctgtttgtgctgtgggaccagcagcacaagtttcctgtgttcatggggagggtgtatgaccccagggcctgacatctagagctgaattcctgcagccagggggatcagcctctactgtgccttctagttgccagccatctgttgtttgcccctcccccttgccttccttgaccctggaaggtgccactcccactgtcctttcctaataaaatgaggaaattgcatcacattgtctgagtaggtgtcattctattctggggggtggggtggggcaggacagcaagggggaggattgggaagacaatagcaggcatgctggggatgcagtgggctctatggcttctgaggcagaaagaaccagctggggctcgagatccactagggccgcaggaacccctagtgatggagttggccactccctctctgcgcgctcgctcgctcactgaggccgggcgaccaaaggtcgcccgacgcccgggctttgcccgggcggcctcagtgagcgagcgagcgcgcag

SEQ ID NO: 34 - DNA, 3674 bp, Artificial Sequence
  pSwap_2xApoE_hAAT_HBB2m1_SERPING1co21_BGH228
ctgcgcgctcgctcgctcactgaggccgcccgggcaaagcccgggcggcctcagtgagcgagcgagcgcgcagagagggagtggccaactccatcactaggggttcctgcggcctagtactaggctcagaggcacacaggagtttctgggctcaccctgcccccttccaacccctcagttcccatcctccagcagctgtttgtgtgctgcctctgaagtccacactgaacaaacttcagcctactcatgtccctaaaatgggcaaacattgcaagcagcaaacagcaaacacacagccctccctgcctgctgaccttggagctggggcagaggtcagagacctctctgggcccatgccacctccaacatccactcgaccccttggaatttcggtggagaggagcagaggttgtcctggcgggtttaggtagtgtgagagggaggctcagaggcacacaggagtttctgggctcaccctgcccccttccaacccctcagttcccatcctccagcagctgtttgtgtgctgcctctgaagtccacactgaacaaacttcagcctactcatgtccctaaaatgggcaaacattgcaagcagcaaacagcaaacacacagccctccctgcctgctgaccttggagctggggcagaggtcagagacctctctgggcccatgccacctccaacatccactcgaccccttggaatttcggtggagaggagcagaggttgtcctggcgtggtttaggtagtgtgagaggggtacccggggatcttgctaccagtggaacagccactaaggattctgcagtgagagcagagggccagctaagtggtactctcccagagactgtctgactcacgccaccccctccaccttggacacaggacgctgtggtttctgagccaggtacaatgactcctttcggtaagtgcagtggaagctgtacactgcccaggcaaagcgtccgggcagcgtaggcgggcgactcagatcccagccagtggacttagcccctgtttgctcctccgataactggggtgaccttggttaatattcaccagcagcctcccccgttgcccctctggatccactgcttaaatacggacgaggacagggccctgtctcctcagcttcaggcaccaccactgacctgggacagtgaatagatcttgagaacttcagggtgagtctatgggacccttgatgttttctttccccttcttttctatggttaagttcatgtcataggaaggggagaagtaacagggtacacatattgaccaaatcagggtaattttgcatttgtaattttaaaaaatgctttcttcttttaatatacttttttgtttatcttatttctaatactttccctaatctctttctttcagggcaataatgatacaatgtatcatgcctctttgcaccattctaaagaataacagtgataatttctgggttaaggcaatagcaatatttctgcatataaatatttctgcatataaattgtaactgatgtaagaggtttcatattgctaatagcagctacaatccagctaccattctgcttttattttctggttgggataaggctggattattctgagtccaagctaggcccttttgctaatcttgttcatacctcttatcttcctcccacagctcctgggcaacctgctggtctctctgctggcccatcactttggcaaagcactagtgccaccatggcctctaggctgactctgctgactctgctgctcctgctgctggctggggacagggccagctctaaccccaatgctacttctagctcctctcaggaccctgagagcctgcaggacaggggggagggcaaggtggccaccactgtgatctctaagatgctgtttgtggagcccatcctggaggtgagcagcctgcccaccaccaacagcaccaccaactctgccactaagatcactgccaacaccactgatgagcccaccacccagcccactactgagcccaccacccagcctactatccagcccacccagcccactacccagctgcccactgacagccctacccagcccaccactggcagcttctgccctgggcctgtgaccctgtgctctgacctggagagccattctactgaggctgtgctgggggatgccctggtggacttctctctgaagctgtaccatgctttctctgccatgaagaaggtggagactaacatggcttttagccccttcagcattgctagcctgctgacccaggtgctgctgggggctggggagaacactaagaccaacctggaatctatcctgagctaccccaaggacttcacctgtgtgcaccaggccctgaagggcttcaccaccaagggggtgacctctgtgagccagatcttccacagccctgacctggccatcagggatacttttgtgaatgccagcagaaccctgtactcttctagccccagggtgctgagcaataattctgatgctaacctggagctgatcaatacctgggtggctaagaataccaacaacaagattagcaggctgctggactctctgccttctgataccaggctggtgctgctgaatgccatttacctgtctgccaagtggaagaccacttttgaccctaagaagactaggatggagcctttccacttcaagaactctgtcattaaggtgcccatgatgaacagcaagaagtatcctgtggcccactttattgaccagactctgaaggccaaggtgggccagctgcagctgagccataacctgagcctggtgatcctggtgccccagaacctgaagcataggctggaggacatggagcaggctctgagcccctctgtgttcaaggctattatggagaagctggagatgagcaagttccagcccactctgctgaccctgcccagaatcaaggtgaccacctctcaggacatgctgagcatcatggaaaagctggagttctttgacttttcttatgacctgaatctgtgtggcctgactgaggatcctgatctgcaggtgtctgccatgcagcaccagactgtgctggagctgactgagactggggtggaggctgctgctgcttctgccatctctgtggccaggaccctgctggtgtttgaggtgcagcagcccttcctgtttgtgctgtgggaccagcagcacaagtttcctgtgttcatgggcagggtgtatgaccccagagcctgacatctagagctgaattcctgcagccagggggatcagcctctactgtgccttctagttgccagccatctgttgtttgcccctcccccttgccttccttgaccctggaaggtgccactcccactgtcctttcctaataaaatgaggaaattgcatcacattgtctgagtaggtgtcattctattctggggggtggggtggggcaggacagcaagggggaggattgggaagacaatagcaggcatgctggggatgcagtgggctctatggcttctgaggcagaaagaaccagctggggctcgagatccactagggccgcaggaacccctagtgatggagttggccactccctctctgcgcgctcgctcgctcactgaggccgggcgaccaaaggtcgcccgacgcccgggctttgcccgggcggcctcagtgagcgagcgagcgcgcag

SEQ ID NO: 35 - DNA, 4316 bp, Artificial Sequence
  pSwap_4xApoE_hAAT_HBB2m1_SERPING1co21_BGH228
ctgcgcgctcgctcgctcactgaggccgcccgggcaaagcccgggcggcctcagtgagcgagcgagcgcgcagagagggagtggccaactccatcactaggggttcctgcggcctagtactaggctcagaggcacacaggagtttctgggctcaccctgcccccttccaacccctcagttcccatcctccagcagctgtttgtgtgctgcctctgaagtccacactgaacaaacttcagcctactcatgtccctaaaatgggcaaacattgcaagcagcaaacagcaaacacacagccctccctgcctgctgaccttggagctggggcagaggtcagagacctctctgggcccatgccacctccaacatccactcgaccccttggaatttcggtggagaggagcagaggttgtcctggcgggtttaggtagtgtgagagggaggctcagaggcacacaggagtttctgggctcaccctgcccccttccaacccctcagttcccatcctccagcagctgtttgtgtgctgcctctgaagtccacactgaacaaacttcagcctactcatgtccctaaaatgggcaaacattgcaagcagcaaacagcaaacacacagccctccctgcctgctgaccttggagctggggcagaggtcagagacctctctgggcccatgccacctccaacatccactcgaccccttggaatttcggtggagaggagcagaggttgtcctggcgtggtttaggtagtgtgagagggaggctcagaggcacacaggagtttctgggctcaccctgcccccttccaacccctcagttcccatcctccagcagctgtttgtgtgctgcctctgaagtccacactgaacaaacttcagcctactcatgtccctaaaatgggcaaacattgcaagcagcaaacagcaaacacacagccctccctgcctgctgaccttggagctggggcagaggtcagagacctctctgggcccatgccacctccaacatccactcgaccccttggaatttcggtggagaggagcagaggttgtcctggcgtggtttaggtagtgtgagagggaggctcagaggcacacaggagtttctgggctcaccctgcccccttccaacccctcagttcccatcctccagcagctgtttgtgtgctgcctctgaagtccacactgaacaaacttcagcctactcatgtccctaaaatgggcaaacattgcaagcagcaaacagcaaacacacagccctccctgcctgctgaccttggagctggggcagaggtcagagacctctctgggcccatgccacctccaacatccactcgaccccttggaatttcggtggagaggagcagaggttgtcctggcgtggtttaggtagtgtgagaggggtacccggggatcttgctaccagtggaacagccactaaggattctgcagtgagagcagagggccagctaagtggtactctcccagagactgtctgactcacgccaccccctccaccttggacacaggacgctgtggtttctgagccaggtacaatgactcctttcggtaagtgcagtggaagctgtacactgcccaggcaaagcgtccgggcagcgtaggcgggcgactcagatcccagccagtggacttagcccctgtttgctcctccgataactggggtgaccttggttaatattcaccagcagcctcccccgttgcccctctggatccactgcttaaatacggacgaggacagggccctgtctcctcagcttcaggcaccaccactgacctgggacagtgaatagatcttgagaacttcagggtgagtctatgggacccttgatgttttctttccccttcttttctatggttaagttcatgtcataggaaggggagaagtaacagggtacacatattgaccaaatcagggtaattttgcatttgtaattttaaaaaatgctttcttcttttaatatacttttttgtttatcttatttctaatactttccctaatctctttctttcagggcaataatgatacaatgtatcatgcctctttgcaccattctaaagaataacagtgataatttctgggttaaggcaatagcaatatttctgcatataaatatttctgcatataaattgtaactgatgtaagaggtttcatattgctaatagcagctacaatccagctaccattctgcttttattttctggttgggataaggctggattattctgagtccaagctaggcccttttgctaatcttgttcatacctcttatcttcctcccacagctcctgggcaacctgctggtctctctgctggcccatcactttggcaaagcactagtgccaccatggcctctaggctgactctgctgactctgctgctcctgctgctggctggggacagggccagctctaaccccaatgctacttctagctcctctcaggaccctgagagcctgcaggacaggggggagggcaaggtggccaccactgtgatctctaagatgctgtttgtggagcccatcctggaggtgagcagcctgcccaccaccaacagcaccaccaactctgccactaagatcactgccaacaccactgatgagcccaccacccagcccactactgagcccaccacccagcctactatccagcccacccagcccactacccagctgcccactgacagccctacccagcccaccactggcagcttctgccctgggcctgtgaccctgtgctctgacctggagagccattctactgaggctgtgctgggggatgccctggtggacttctctctgaagctgtaccatgctttctctgccatgaagaaggtggagactaacatggcttttagccccttcagcattgctagcctgctgacccaggtgctgctgggggctggggagaacactaagaccaacctggaatctatcctgagctaccccaaggacttcacctgtgtgcaccaggccctgaagggcttcaccaccaagggggtgacctctgtgagccagatcttccacagccctgacctggccatcagggatacttttgtgaatgccagcagaaccctgtactcttctagccccagggtgctgagcaataattctgatgctaacctggagctgatcaatacctgggtggctaagaataccaacaacaagattagcaggctgctggactctctgccttctgataccaggctggtgctgctgaatgccatttacctgtctgccaagtggaagaccacttttgaccctaagaagactaggatggagcctttccacttcaagaactctgtcattaaggtgcccatgatgaacagcaagaagtatcctgtggcccactttattgaccagactctgaaggccaaggtgggccagctgcagctgagccataacctgagcctggtgatcctggtgccccagaacctgaagcataggctggaggacatggagcaggctctgagcccctctgtgttcaaggctattatggagaagctggagatgagcaagttccagcccactctgctgaccctgcccagaatcaaggtgaccacctctcaggacatgctgagcatcatggaaaagctggagttctttgacttttcttatgacctgaatctgtgtggcctgactgaggatcctgatctgcaggtgtctgccatgcagcaccagactgtgctggagctgactgagactggggtggaggctgctgctgcttctgccatctctgtggccaggaccctgctggtgtttgaggtgcagcagcccttcctgtttgtgctgtgggaccagcagcacaagtttcctgtgttcatgggcagggtgtatgaccccagagcctgacatctagagctgaattcctgcagccagggggatcagcctctactgtgccttctagttgccagccatctgttgtttgcccctcccccttgccttccttgaccctggaaggtgccactcccactgtcctttcctaataaaatgaggaaattgcatcacattgtctgagtaggtgtcattctattctggggggtggggtggggcaggacagcaagggggaggattgggaagacaatagcaggcatgctggggatgcagtgggctctatggcttctgaggcagaaagaaccagctggggctcgagatccactagggccgcaggaacccctagtgatggagttggccactccctctctgcgcgctcgctcgctcactgaggccgggcgaccaaaggtcgcccgacgcccgggctttgcccgggcggcctcagtgagcgagcgagcgcgcag

SEQ ID NO: 36 - DNA, 3674 bp, Artificial Sequence
  pSwap_hAAT_HBB2m1_SERPING1co21_2xApoE_BGH228
ctgcgcgctcgctcgctcactgaggccgcccgggcaaagcccgggcggcctcagtgagcgagcgagcgcgcagagagggagtggccaactccatcactaggggttcctgcggcctagtccggggatcttgctaccagtggaacagccactaaggattctgcagtgagagcagagggccagctaagtggtactctcccagagactgtctgactcacgccaccccctccaccttggacacaggacgctgtggtttctgagccaggtacaatgactcctttcggtaagtgcagtggaagctgtacactgcccaggcaaagcgtccgggcagcgtaggcgggcgactcagatcccagccagtggacttagcccctgtttgctcctccgataactggggtgaccttggttaatattcaccagcagcctcccccgttgcccctctggatccactgcttaaatacggacgaggacagggccctgtctcctcagcttcaggcaccaccactgacctgggacagtgaatagatcttgagaacttcagggtgagtctatgggacccttgatgttttctttccccttcttttctatggttaagttcatgtcataggaaggggagaagtaacagggtacacatattgaccaaatcagggtaattttgcatttgtaattttaaaaaatgctttcttcttttaatatacttttttgtttatcttatttctaatactttccctaatctctttctttcagggcaataatgatacaatgtatcatgcctctttgcaccattctaaagaataacagtgataatttctgggttaaggcaatagcaatatttctgcatataaatatttctgcatataaattgtaactgatgtaagaggtttcatattgctaatagcagctacaatccagctaccattctgcttttattttctggttgggataaggctggattattctgagtccaagctaggcccttttgctaatcttgttcatacctcttatcttcctcccacagctcctgggcaacctgctggtctctctgctggcccatcactttggcaaagcactagtgccaccatggcctctaggctgactctgctgactctgctgctcctgctgctggctggggacagggccagctctaaccccaatgctacttctagctcctctcaggaccctgagagcctgcaggacaggggggagggcaaggtggccaccactgtgatctctaagatgctgtttgtggagcccatcctggaggtgagcagcctgcccaccaccaacagcaccaccaactctgccactaagatcactgccaacaccactgatgagcccaccacccagcccactactgagcccaccacccagcctactatccagcccacccagcccactacccagctgcccactgacagccctacccagcccaccactggcagcttctgccctgggcctgtgaccctgtgctctgacctggagagccattctactgaggctgtgctgggggatgccctggtggacttctctctgaagctgtaccatgctttctctgccatgaagaaggtggagactaacatggcttttagccccttcagcattgctagcctgctgacccaggtgctgctgggggctggggagaacactaagaccaacctggaatctatcctgagctaccccaaggacttcacctgtgtgcaccaggccctgaagggcttcaccaccaagggggtgacctctgtgagccagatcttccacagccctgacctggccatcagggatacttttgtgaatgccagcagaaccctgtactcttctagccccagggtgctgagcaataattctgatgctaacctggagctgatcaatacctgggtggctaagaataccaacaacaagattagcaggctgctggactctctgccttctgataccaggctggtgctgctgaatgccatttacctgtctgccaagtggaagaccacttttgaccctaagaagactaggatggagcctttccacttcaagaactctgtcattaaggtgcccatgatgaacagcaagaagtatcctgtggcccactttattgaccagactctgaaggccaaggtgggccagctgcagctgagccataacctgagcctggtgatcctggtgccccagaacctgaagcataggctggaggacatggagcaggctctgagcccctctgtgttcaaggctattatggagaagctggagatgagcaagttccagcccactctgctgaccctgcccagaatcaaggtgaccacctctcaggacatgctgagcatcatggaaaagctggagttctttgacttttcttatgacctgaatctgtgtggcctgactgaggatcctgatctgcaggtgtctgccatgcagcaccagactgtgctggagctgactgagactggggtggaggctgctgctgcttctgccatctctgtggccaggaccctgctggtgtttgaggtgcagcagcccttcctgtttgtgctgtgggaccagcagcacaagtttcctgtgttcatgggcagggtgtatgaccccagagcctgacatctagaaggctcagaggcacacaggagtttctgggctcaccctgcccccttccaacccctcagttcccatcctccagcagctgtttgtgtgctgcctctgaagtccacactgaacaaacttcagcctactcatgtccctaaaatgggcaaacattgcaagcagcaaacagcaaacacacagccctccctgcctgctgaccttggagctggggcagaggtcagagacctctctgggcccatgccacctccaacatccactcgaccccttggaatttcggtggagaggagcagaggttgtcctggcgtggtttaggtagtgtgagagggaggctcagaggcacacaggagtttctgggctcaccctgcccccttccaacccctcagttcccatcctccagcagctgtttgtgtgctgcctctgaagtccacactgaacaaacttcagcctactcatgtccctaaaatgggcaaacattgcaagcagcaaacagcaaacacacagccctccctgcctgctgaccttggagctggggcagaggtcagagacctctctgggcccatgccacctccaacatccactcgaccccttggaatttcggtggagaggagcagaggttgtcctggcgtggtttaggtagtgtgagagggtctagagctgaattcctgcagccagggggatcagcctctactgtgccttctagttgccagccatctgttgtttgcccctcccccttgccttccttgaccctggaaggtgccactcccactgtcctttcctaataaaatgaggaaattgcatcacattgtctgagtaggtgtcattctattctggggggtggggtggggcaggacagcaagggggaggattgggaagacaatagcaggcatgctggggatgcagtgggctctatggcttctgaggcagaaagaaccagctggggctcgagatccactagggccgcaggaacccctagtgatggagttggccactccctctctgcgcgctcgctcgctcactgaggccgggcgaccaaaggtcgcccgacgcccgggctttgcccgggcggcctcagtgagcgagcgagcgcgcag

SEQ ID NO: 37 - DNA, 4315 bp, Artificial Sequence
  pSwap_hAAT_HBB2m1_SERPING1co21_4xApoE_BGH228
ctgcgcgctcgctcgctcactgaggccgcccgggcaaagcccgggcggcctcagtgagcgagcgagcgcgcagagagggagtggccaactccatcactaggggttcctgcggcctagtccggggatcttgctaccagtggaacagccactaaggattctgcagtgagagcagagggccagctaagtggtactctcccagagactgtctgactcacgccaccccctccaccttggacacaggacgctgtggtttctgagccaggtacaatgactcctttcggtaagtgcagtggaagctgtacactgcccaggcaaagcgtccgggcagcgtaggcgggcgactcagatcccagccagtggacttagcccctgtttgctcctccgataactggggtgaccttggttaatattcaccagcagcctcccccgttgcccctctggatccactgcttaaatacggacgaggacagggccctgtctcctcagcttcaggcaccaccactgacctgggacagtgaatagatcttgagaacttcagggtgagtctatgggacccttgatgttttctttccccttcttttctatggttaagttcatgtcataggaaggggagaagtaacagggtacacatattgaccaaatcagggtaattttgcatttgtaattttaaaaaatgctttcttcttttaatatacttttttgtttatcttatttctaatactttccctaatctctttctttcagggcaataatgatacaatgtatcatgcctctttgcaccattctaaagaataacagtgataatttctgggttaaggcaatagcaatatttctgcatataaatatttctgcatataaattgtaactgatgtaagaggtttcatattgctaatagcagctacaatccagctaccattctgcttttattttctggttgggataaggctggattattctgagtccaagctaggcccttttgctaatcttgttcatacctcttatcttcctcccacagctcctgggcaacctgctggtctctctgctggcccatcactttggcaaagcactagtgccaccatggcctctaggctgactctgctgactctgctgctcctgctgctggctggggacagggccagctctaaccccaatgctacttctagctcctctcaggaccctgagagcctgcaggacaggggggagggcaaggtggccaccactgtgatctctaagatgctgtttgtggagcccatcctggaggtgagcagcctgcccaccaccaacagcaccaccaactctgccactaagatcactgccaacaccactgatgagcccaccacccagcccactactgagcccaccacccagcctactatccagcccacccagcccactacccagctgcccactgacagccctacccagcccaccactggcagcttctgccctgggcctgtgaccctgtgctctgacctggagagccattctactgaggctgtgctgggggatgccctggtggacttctctctgaagctgtaccatgctttctctgccatgaagaaggtggagactaacatggcttttagccccttcagcattgctagcctgctgacccaggtgctgctgggggctggggagaacactaagaccaacctggaatctatcctgagctaccccaaggacttcacctgtgtgcaccaggccctgaagggcttcaccaccaagggggtgacctctgtgagccagatcttccacagccctgacctggccatcagggatacttttgtgaatgccagcagaaccctgtactcttctagccccagggtgctgagcaataattctgatgctaacctggagctgatcaatacctgggtggctaagaataccaacaacaagattagcaggctgctggactctctgccttctgataccaggctggtgctgctgaatgccatttacctgtctgccaagtggaagaccacttttgaccctaagaagactaggatggagcctttccacttcaagaactctgtcattaaggtgcccatgatgaacagcaagaagtatcctgtggcccactttattgaccagactctgaaggccaaggtgggccagctgcagctgagccataacctgagcctggtgatcctggtgccccagaacctgaagcataggctggaggacatggagcaggctctgagcccctctgtgttcaaggctattatggagaagctggagatgagcaagttccagcccactctgctgaccctgcccagaatcaaggtgaccacctctcaggacatgctgagcatcatggaaaagctggagttctttgacttttcttatgacctgaatctgtgtggcctgactgaggatcctgatctgcaggtgtctgccatgcagcaccagactgtgctggagctgactgagactggggtggaggctgctgctgcttctgccatctctgtggccaggaccctgctggtgtttgaggtgcagcagcccttcctgtttgtgctgtgggaccagcagcacaagtttcctgtgttcatgggcagggtgtatgaccccagagcctgacatctagaaggctcagaggcacacaggagtttctgggctcaccctgcccccttccaacccctcagttcccatcctccagcagctgtttgtgtgctgcctctgaagtccacactgaacaaacttcagcctactcatgtccctaaaatgggcaaacattgcaagcagcaaacagcaaacacacagccctccctgcctgctgaccttggagctggggcagaggtcagagacctctctgggcccatgccacctccaacatccactcgaccccttggaatttcggtggagaggagcagaggttgtcctggcgggtttaggtagtgtgagagggaggctcagaggcacacaggagtttctgggctcaccctgcccccttccaacccctcagttcccatcctccagcagctgtttgtgtgctgcctctgaagtccacactgaacaaacttcagcctactcatgtccctaaaatgggcaaacattgcaagcagcaaacagcaaacacacagccctccctgcctgctgaccttggagctggggcagaggtcagagacctctctgggcccatgccacctccaacatccactcgaccccttggaatttcggtggagaggagcagaggttgtcctggcgtggtttaggtagtgtgagagggaggctcagaggcacacaggagtttctgggctcaccctgcccccttccaacccctcagttcccatcctccagcagctgtttgtgtgctgcctctgaagtccacactgaacaaacttcagcctactcatgtccctaaaatgggcaaacattgcaagcagcaaacagcaaacacacagccctccctgcctgctgaccttggagctggggcagaggtcagagacctctctgggcccatgccacctccaacatccactcgaccccttggaatttcggtggagaggagcagaggttgtcctggcgtggtttaggtagtgtgagagggaggctcagaggcacacaggagtttctgggctcaccctgcccccttccaacccctcagttcccatcctccagcagctgtttgtgtgctgcctctgaagtccacactgaacaaacttcagcctactcatgtccctaaaatgggcaaacattgcaagcagcaaacagcaaacacacagccctccctgcctgctgaccttggagctggggcagaggtcagagacctctctgggcccatgccacctccaacatccactcgaccccttggaatttcggtggagaggagcagaggttgtcctggcgtggtttaggtagtgtgagagggtctagagctgaattcctgcagccagggggatcagcctctactgtgccttctagttgccagccatctgttgtttgcccctcccccttgccttccttgaccctggaaggtgccactcccactgtcctttcctaataaaatgaggaaattgcatcacattgtctgagtaggtgtcattctattctggggggtggggtggggcaggacagcaagggggaggattgggaagacaatagcaggcatgctggggatgcagtgggctctatggcttctgaggcagaaagaaccagctggggctcgagatccactagggccgcaggaacccctagtgatggagttggccactccctctctgcgcgctcgctcgctcactgaggccgggcgaccaaaggtcgcccgacgcccgggctttgcccgggcggcctcagtgagcgagcgagcgcgcag

SEQ ID NO: 38 - DNA, 3867 bp, Artificial Sequence
  pSwap_ApoE_hAAT_HBB2m1_SERPING1co21_hAATenh_BGH228
ctgcgcgctcgctcgctcactgaggccgcccgggcaaagcccgggcggcctcagtgagcgagcgagcgcgcagagagggagtggccaactccatcactaggggttcctgcggcctagtactaggctcagaggcacacaggagtttctgggctcaccctgcccccttccaacccctcagttcccatcctccagcagctgtttgtgtgctgcctctgaagtccacactgaacaaacttcagcctactcatgtccctaaaatgggcaaacattgcaagcagcaaacagcaaacacacagccctccctgcctgctgaccttggagctggggcagaggtcagagacctctctgggcccatgccacctccaacatccactcgaccccttggaatttcggtggagaggagcagaggttgtcctggcgtggtttaggtagtgtgagaggggtacccggggatcttgctaccagtggaacagccactaaggattctgcagtgagagcagagggccagctaagtggtactctcccagagactgtctgactcacgccaccccctccaccttggacacaggacgctgtggtttctgagccaggtacaatgactcctttcggtaagtgcagtggaagctgtacactgcccaggcaaagcgtccgggcagcgtaggcgggcgactcagatcccagccagtggacttagcccctgtttgctcctccgataactggggtgaccttggttaatattcaccagcagcctcccccgttgcccctctggatccactgcttaaatacggacgaggacagggccctgtctcctcagcttcaggcaccaccactgacctgggacagtgaatagatcttgagaacttcagggtgagtctatgggacccttgatgttttctttccccttcttttctatggttaagttcatgtcataggaaggggagaagtaacagggtacacatattgaccaaatcagggtaattttgcatttgtaattttaaaaaatgctttcttcttttaatatacttttttgtttatcttatttctaatactttccctaatctctttctttcagggcaataatgatacaatgtatcatgcctctttgcaccattctaaagaataacagtgataatttctgggttaaggcaatagcaatatttctgcatataaatatttctgcatataaattgtaactgatgtaagaggtttcatattgctaatagcagctacaatccagctaccattctgcttttattttctggttgggataaggctggattattctgagtccaagctaggcccttttgctaatcttgttcatacctcttatcttcctcccacagctcctgggcaacctgctggtctctctgctggcccatcactttggcaaagcactagtgccaccatggcctctaggctgactctgctgactctgctgctcctgctgctggctggggacagggccagctctaaccccaatgctacttctagctcctctcaggaccctgagagcctgcaggacaggggggagggcaaggtggccaccactgtgatctctaagatgctgtttgtggagcccatcctggaggtgagcagcctgcccaccaccaacagcaccaccaactctgccactaagatcactgccaacaccactgatgagcccaccacccagcccactactgagcccaccacccagcctactatccagcccacccagcccactacccagctgcccactgacagccctacccagcccaccactggcagcttctgccctgggcctgtgaccctgtgctctgacctggagagccattctactgaggctgtgctgggggatgccctggtggacttctctctgaagctgtaccatgctttctctgccatgaagaaggtggagactaacatggcttttagccccttcagcattgctagcctgctgacccaggtgctgctgggggctggggagaacactaagaccaacctggaatctatcctgagctaccccaaggacttcacctgtgtgcaccaggccctgaagggcttcaccaccaagggggtgacctctgtgagccagatcttccacagccctgacctggccatcagggatacttttgtgaatgccagcagaaccctgtactcttctagccccagggtgctgagcaataattctgatgctaacctggagctgatcaatacctgggtggctaagaataccaacaacaagattagcaggctgctggactctctgccttctgataccaggctggtgctgctgaatgccatttacctgtctgccaagtggaagaccacttttgaccctaagaagactaggatggagcctttccacttcaagaactctgtcattaaggtgcccatgatgaacagcaagaagtatcctgtggcccactttattgaccagactctgaaggccaaggtgggccagctgcagctgagccataacctgagcctggtgatcctggtgccccagaacctgaagcataggctggaggacatggagcaggctctgagcccctctgtgttcaaggctattatggagaagctggagatgagcaagttccagcccactctgctgaccctgcccagaatcaaggtgaccacctctcaggacatgctgagcatcatggaaaagctggagttctttgacttttcttatgacctgaatctgtgtggcctgactgaggatcctgatctgcaggtgtctgccatgcagcaccagactgtgctggagctgactgagactggggtggaggctgctgctgcttctgccatctctgtggccaggaccctgctggtgtttgaggtgcagcagcccttcctgtttgtgctgtgggaccagcagcacaagtttcctgtgttcatgggcagggtgtatgaccccagagcctgacatctagacctgcagtcttcagagggccaccgcagctccagtgccacggcaggaggctgttcctgaatagcccctgtggtaagggccaggagagtccttccatcctccaaggccctgctaaaggacacagcagccaggaagtcccctgggcccctagctgaaggacagcctgctccctccgtctctaccaggaatggccttgtcctatggaaggcactgccccatcccaaactaatctaggaatcactgtctaaccactcactgtcatgaatgtgtacttaaaggatgaggttgagtcataccaaatagtgatttcgatagttcaaaatggtgaaattagcaattctacatgattcagtctaatcaatggataccgactgtttcccacacaagtctcctgttctcttaagcttactcactgacagcctttcactctccacaaatacattaaagatatggccatcaccaagccccctaggatgacaccagacctgagagtctgaagacctggatcctctagagctgaattcctgcagccagggggatcagcctctactgtgccttctagttgccagccatctgttgtttgcccctcccccttgccttccttgaccctggaaggtgccactcccactgtcctttcctaataaaatgaggaaattgcatcacattgtctgagtaggtgtcattctattctggggggtggggtggggcaggacagcaagggggaggattgggaagacaatagcaggcatgctggggatgcagtgggctctatggcttctgaggcagaaagaaccagctggggctcgagatccactagggccgcaggaacccctagtgatggagttggccactccctctctgcgcgctcgctcgctcactgaggccgggcgaccaaaggtcgcccgacgcccgggctttgcccgggcggcctcagtgagcgagcgagcgcgcag

SEQ ID NO: 39 - DNA, 3867 bp, Artificial Sequence
  pSwap_ApoE_hAAT_HBB2m1_SERPING1co21_hAATenh(co1)_BGH228
ctgcgcgctcgctcgctcactgaggccgcccgggcaaagcccgggcggcctcagtgagcgagcgagcgcgcagagagggagtggccaactccatcactaggggttcctgcggcctagtactaggctcagaggcacacaggagtttctgggctcaccctgcccccttccaacccctcagttcccatcctccagcagctgtttgtgtgctgcctctgaagtccacactgaacaaacttcagcctactcatgtccctaaaatgggcaaacattgcaagcagcaaacagcaaacacacagccctccctgcctgctgaccttggagctggggcagaggtcagagacctctctgggcccatgccacctccaacatccactcgaccccttggaatttcggtggagaggagcagaggttgtcctggcgtggtttaggtagtgtgagaggggtacccggggatcttgctaccagtggaacagccactaaggattctgcagtgagagcagagggccagctaagtggtactctcccagagactgtctgactcacgccaccccctccaccttggacacaggacgctgtggtttctgagccaggtacaatgactcctttcggtaagtgcagtggaagctgtacactgcccaggcaaagcgtccgggcagcgtaggcgggcgactcagatcccagccagtggacttagcccctgtttgctcctccgataactggggtgaccttggttaatattcaccagcagcctcccccgttgcccctctggatccactgcttaaatacggacgaggacagggccctgtctcctcagcttcaggcaccaccactgacctgggacagtgaatagatcttgagaacttcagggtgagtctatgggacccttgatgttttctttccccttcttttctatggttaagttcatgtcataggaaggggagaagtaacagggtacacatattgaccaaatcagggtaattttgcatttgtaattttaaaaaatgctttcttcttttaatatacttttttgtttatcttatttctaatactttccctaatctctttctttcagggcaataatgatacaatgtatcatgcctctttgcaccattctaaagaataacagtgataatttctgggttaaggcaatagcaatatttctgcatataaatatttctgcatataaattgtaactgatgtaagaggtttcatattgctaatagcagctacaatccagctaccattctgcttttattttctggttgggataaggctggattattctgagtccaagctaggcccttttgctaatcttgttcatacctcttatcttcctcccacagctcctgggcaacctgctggtctctctgctggcccatcactttggcaaagcactagtgccaccatggcctctaggctgactctgctgactctgctgctcctgctgctggctggggacagggccagctctaaccccaatgctacttctagctcctctcaggaccctgagagcctgcaggacaggggggagggcaaggtggccaccactgtgatctctaagatgctgtttgtggagcccatcctggaggtgagcagcctgcccaccaccaacagcaccaccaactctgccactaagatcactgccaacaccactgatgagcccaccacccagcccactactgagcccaccacccagcctactatccagcccacccagcccactacccagctgcccactgacagccctacccagcccaccactggcagcttctgccctgggcctgtgaccctgtgctctgacctggagagccattctactgaggctgtgctgggggatgccctggtggacttctctctgaagctgtaccatgctttctctgccatgaagaaggtggagactaacatggcttttagccccttcagcattgctagcctgctgacccaggtgctgctgggggctggggagaacactaagaccaacctggaatctatcctgagctaccccaaggacttcacctgtgtgcaccaggccctgaagggcttcaccaccaagggggtgacctctgtgagccagatcttccacagccctgacctggccatcagggatacttttgtgaatgccagcagaaccctgtactcttctagccccagggtgctgagcaataattctgatgctaacctggagctgatcaatacctgggtggctaagaataccaacaacaagattagcaggctgctggactctctgccttctgataccaggctggtgctgctgaatgccatttacctgtctgccaagtggaagaccacttttgaccctaagaagactaggatggagcctttccacttcaagaactctgtcattaaggtgcccatgatgaacagcaagaagtatcctgtggcccactttattgaccagactctgaaggccaaggtgggccagctgcagctgagccataacctgagcctggtgatcctggtgccccagaacctgaagcataggctggaggacatggagcaggctctgagcccctctgtgttcaaggctattatggagaagctggagatgagcaagttccagcccactctgctgaccctgcccagaatcaaggtgaccacctctcaggacatgctgagcatcatggaaaagctggagttctttgacttttcttatgacctgaatctgtgtggcctgactgaggatcctgatctgcaggtgtctgccatgcagcaccagactgtgctggagctgactgagactggggtggaggctgctgctgcttctgccatctctgtggccaggaccctgctggtgtttgaggtgcagcagcccttcctgtttgtgctgtgggaccagcagcacaagtttcctgtgttcatgggcagggtgtatgaccccagagcctgacatctagacctgcagtcttcagagggccactgcagctccagtgccatggcaggaggctgttcctgaatagcccctgtggtaagggccaggagagtccttccatcctccaaggccctgctaaaggacacagcagccaggaagtcccctgggcccctagctgaaggacagcctgctccctctgtctctaccaggaatggccttgtcctatggaaggcactgccccatcccaaactaatctaggaatcactgtctaaccactcactgtcatgaatgtgtacttaaaggatgaggttgagtcataccaaatagtgattttgatagttcaaaatggtgaaattagcaattctacatgattcagtctaatcaatggatactgactgtttcccacacaagtctcctgttctcttaagcttactcactgacagcctttcactctccacaaatacattaaagatatggccatcaccaagccccctaggatgacaccagacctgagagtctgaagacctggatcctctagagctgaattcctgcagccagggggatcagcctctactgtgccttctagttgccagccatctgttgtttgcccctcccccttgccttccttgaccctggaaggtgccactcccactgtcctttcctaataaaatgaggaaattgcatcacattgtctgagtaggtgtcattctattctggggggtggggtggggcaggacagcaagggggaggattgggaagacaatagcaggcatgctggggatgcagtgggctctatggcttctgaggcagaaagaaccagctggggctcgagatccactagggccgcaggaacccctagtgatggagttggccactccctctctgcgcgctcgctcgctcactgaggccgggcgaccaaaggtcgcccgacgcccgggctttgcccgggcggcctcagtgagcgagcgagcgcgcag

SEQ ID NO: 40 - DNA, 3607 bp, Artificial Sequence
  pSwap_ApoE_hAAT_HBB2m1_SERPING1co21_WPRE3_BGH228
ctgcgcgctcgctcgctcactgaggccgcccgggcaaagcccgggcggcctcagtgagcgagcgagcgcgcagagagggagtggccaactccatcactaggggttcctgcggcctagtactaggctcagaggcacacaggagtttctgggctcaccctgcccccttccaacccctcagttcccatcctccagcagctgtttgtgtgctgcctctgaagtccacactgaacaaacttcagcctactcatgtccctaaaatgggcaaacattgcaagcagcaaacagcaaacacacagccctccctgcctgctgaccttggagctggggcagaggtcagagacctctctgggcccatgccacctccaacatccactcgaccccttggaatttcggtggagaggagcagaggttgtcctggcgtggtttaggtagtgtgagaggggtacccggggatcttgctaccagtggaacagccactaaggattctgcagtgagagcagagggccagctaagtggtactctcccagagactgtctgactcacgccaccccctccaccttggacacaggacgctgtggtttctgagccaggtacaatgactcctttcggtaagtgcagtggaagctgtacactgcccaggcaaagcgtccgggcagcgtaggcgggcgactcagatcccagccagtggacttagcccctgtttgctcctccgataactggggtgaccttggttaatattcaccagcagcctcccccgttgcccctctggatccactgcttaaatacggacgaggacagggccctgtctcctcagcttcaggcaccaccactgacctgggacagtgaatagatcttgagaacttcagggtgagtctatgggacccttgatgttttctttccccttcttttctatggttaagttcatgtcataggaaggggagaagtaacagggtacacatattgaccaaatcagggtaattttgcatttgtaattttaaaaaatgctttcttcttttaatatacttttttgtttatcttatttctaatactttccctaatctctttctttcagggcaataatgatacaatgtatcatgcctctttgcaccattctaaagaataacagtgataatttctgggttaaggcaatagcaatatttctgcatataaatatttctgcatataaattgtaactgatgtaagaggtttcatattgctaatagcagctacaatccagctaccattctgcttttattttctggttgggataaggctggattattctgagtccaagctaggcccttttgctaatcttgttcatacctcttatcttcctcccacagctcctgggcaacctgctggtctctctgctggcccatcactttggcaaagcactagtgccaccatggcctctaggctgactctgctgactctgctgctcctgctgctggctggggacagggccagctctaaccccaatgctacttctagctcctctcaggaccctgagagcctgcaggacaggggggagggcaaggtggccaccactgtgatctctaagatgctgtttgtggagcccatcctggaggtgagcagcctgcccaccaccaacagcaccaccaactctgccactaagatcactgccaacaccactgatgagcccaccacccagcccactactgagcccaccacccagcctactatccagcccacccagcccactacccagctgcccactgacagccctacccagcccaccactggcagcttctgccctgggcctgtgaccctgtgctctgacctggagagccattctactgaggctgtgctgggggatgccctggtggacttctctctgaagctgtaccatgctttctctgccatgaagaaggtggagactaacatggcttttagccccttcagcattgctagcctgctgacccaggtgctgctgggggctggggagaacactaagaccaacctggaatctatcctgagctaccccaaggacttcacctgtgtgcaccaggccctgaagggcttcaccaccaagggggtgacctctgtgagccagatcttccacagccctgacctggccatcagggatacttttgtgaatgccagcagaaccctgtactcttctagccccagggtgctgagcaataattctgatgctaacctggagctgatcaatacctgggtggctaagaataccaacaacaagattagcaggctgctggactctctgccttctgataccaggctggtgctgctgaatgccatttacctgtctgccaagtggaagaccacttttgaccctaagaagactaggatggagcctttccacttcaagaactctgtcattaaggtgcccatgatgaacagcaagaagtatcctgtggcccactttattgaccagactctgaaggccaaggtgggccagctgcagctgagccataacctgagcctggtgatcctggtgccccagaacctgaagcataggctggaggacatggagcaggctctgagcccctctgtgttcaaggctattatggagaagctggagatgagcaagttccagcccactctgctgaccctgcccagaatcaaggtgaccacctctcaggacatgctgagcatcatggaaaagctggagttctttgacttttcttatgacctgaatctgtgtggcctgactgaggatcctgatctgcaggtgtctgccatgcagcaccagactgtgctggagctgactgagactggggtggaggctgctgctgcttctgccatctctgtggccaggaccctgctggtgtttgaggtgcagcagcccttcctgtttgtgctgtgggaccagcagcacaagtttcctgtgttcatgggcagggtgtatgaccccagagcctgacatctagaaatcaacctctggattacaaaatttgtgaaagattgactggtattcttaactatgttgctccttttacgctatgtggatacgctgctttaatgcctttgtatcatgctattgcttcccgtatggctttcattttctcctccttgtataaatcctggttagttcttgccacggcggaactcatcgccgcctgccttgcccgctgctggacaggggctcggctgttgggcactgacaattccgtggtgttctagagctgaattcctgcagccagggggatcagcctctactgtgccttctagttgccagccatctgttgtttgcccctcccccttgccttccttgaccctggaaggtgccactcccactgtcctttcctaataaaatgaggaaattgcatcacattgtctgagtaggtgtcattctattctggggggtggggtggggcaggacagcaagggggaggattgggaagacaatagcaggcatgctggggatgcagtgggctctatggcttctgaggcagaaagaaccagctggggctcgagatccactagggccgcaggaacccctagtgatggagttggccactccctctctgcgcgctcgctcgctcactgaggccgggcgaccaaaggtcgcccgacgcccgggctttgcccgggcggcctcagtgagcgagcgagcgcgcag

SEQ ID NO: 41 - DNA, 3607 bp, Artificial Sequence
  pSwap_ApoE_hAAT_HBB2m1_SERPING1co21_WPRE3co1_BGH228
ctgcgcgctcgctcgctcactgaggccgcccgggcaaagcccgggcggcctcagtgagcgagcgagcgcgcagagagggagtggccaactccatcactaggggttcctgcggcctagtactaggctcagaggcacacaggagtttctgggctcaccctgcccccttccaacccctcagttcccatcctccagcagctgtttgtgtgctgcctctgaagtccacactgaacaaacttcagcctactcatgtccctaaaatgggcaaacattgcaagcagcaaacagcaaacacacagccctccctgcctgctgaccttggagctggggcagaggtcagagacctctctgggcccatgccacctccaacatccactcgaccccttggaatttcggtggagaggagcagaggttgtcctggcgtggtttaggtagtgtgagaggggtacccggggatcttgctaccagtggaacagccactaaggattctgcagtgagagcagagggccagctaagtggtactctcccagagactgtctgactcacgccaccccctccaccttggacacaggacgctgtggtttctgagccaggtacaatgactcctttcggtaagtgcagtggaagctgtacactgcccaggcaaagcgtccgggcagcgtaggcgggcgactcagatcccagccagtggacttagcccctgtttgctcctccgataactggggtgaccttggttaatattcaccagcagcctcccccgttgcccctctggatccactgcttaaatacggacgaggacagggccctgtctcctcagcttcaggcaccaccactgacctgggacagtgaatagatcttgagaacttcagggtgagtctatgggacccttgatgttttctttccccttcttttctatggttaagttcatgtcataggaaggggagaagtaacagggtacacatattgaccaaatcagggtaattttgcatttgtaattttaaaaaatgctttcttcttttaatatacttttttgtttatcttatttctaatactttccctaatctctttctttcagggcaataatgatacaatgtatcatgcctctttgcaccattctaaagaataacagtgataatttctgggttaaggcaatagcaatatttctgcatataaatatttctgcatataaattgtaactgatgtaagaggtttcatattgctaatagcagctacaatccagctaccattctgcttttattttctggttgggataaggctggattattctgagtccaagctaggcccttttgctaatcttgttcatacctcttatcttcctcccacagctcctgggcaacctgctggtctctctgctggcccatcactttggcaaagcactagtgccaccatggcctctaggctgactctgctgactctgctgctcctgctgctggctggggacagggccagctctaaccccaatgctacttctagctcctctcaggaccctgagagcctgcaggacaggggggagggcaaggtggccaccactgtgatctctaagatgctgtttgtggagcccatcctggaggtgagcagcctgcccaccaccaacagcaccaccaactctgccactaagatcactgccaacaccactgatgagcccaccacccagcccactactgagcccaccacccagcctactatccagcccacccagcccactacccagctgcccactgacagccctacccagcccaccactggcagcttctgccctgggcctgtgaccctgtgctctgacctggagagccattctactgaggctgtgctgggggatgccctggtggacttctctctgaagctgtaccatgctttctctgccatgaagaaggtggagactaacatggcttttagccccttcagcattgctagcctgctgacccaggtgctgctgggggctggggagaacactaagaccaacctggaatctatcctgagctaccccaaggacttcacctgtgtgcaccaggccctgaagggcttcaccaccaagggggtgacctctgtgagccagatcttccacagccctgacctggccatcagggatacttttgtgaatgccagcagaaccctgtactcttctagccccagggtgctgagcaataattctgatgctaacctggagctgatcaatacctgggtggctaagaataccaacaacaagattagcaggctgctggactctctgccttctgataccaggctggtgctgctgaatgccatttacctgtctgccaagtggaagaccacttttgaccctaagaagactaggatggagcctttccacttcaagaactctgtcattaaggtgcccatgatgaacagcaagaagtatcctgtggcccactttattgaccagactctgaaggccaaggtgggccagctgcagctgagccataacctgagcctggtgatcctggtgccccagaacctgaagcataggctggaggacatggagcaggctctgagcccctctgtgttcaaggctattatggagaagctggagatgagcaagttccagcccactctgctgaccctgcccagaatcaaggtgaccacctctcaggacatgctgagcatcatggaaaagctggagttctttgacttttcttatgacctgaatctgtgtggcctgactgaggatcctgatctgcaggtgtctgccatgcagcaccagactgtgctggagctgactgagactggggtggaggctgctgctgcttctgccatctctgtggccaggaccctgctggtgtttgaggtgcagcagcccttcctgtttgtgctgtgggaccagcagcacaagtttcctgtgttcatgggcagggtgtatgaccccagagcctgacatctagaaatcaacctctggattacaaaatttgtgaaagattgactggtattcttaactatgttgctccttttatgctatgtggatatgctgctttaatgcctttgtatcatgctattgcttcctgtatggctttcattttctcctccttgtataaatcctggttagttcttgccatggtggaactcattgctgcctgccttgcctgctgctggacaggggcttggctgttgggcactgacaattctgtggtgttctagagctgaattcctgcagccagggggatcagcctctactgtgccttctagttgccagccatctgttgtttgcccctcccccttgccttccttgaccctggaaggtgccactcccactgtcctttcctaataaaatgaggaaattgcatcacattgtctgagtaggtgtcattctattctggggggtggggtggggcaggacagcaagggggaggattgggaagacaatagcaggcatgctggggatgcagtgggctctatggcttctgaggcagaaagaaccagctggggctcgagatccactagggccgcaggaacccctagtgatggagttggccactccctctctgcgcgctcgctcgctcactgaggccgggcgaccaaaggtcgcccgacgcccgggctttgcccgggcggcctcagtgagcgagcgagcgcgcag

SEQ ID NO: 42 - DNA, 3949 bp, Artificial Sequence
  pSwap_ApoE_hAAT_HBB2m1_SERPING1co21_WPRE_BGH228
ctgcgcgctcgctcgctcactgaggccgcccgggcaaagcccgggcggcctcagtgagcgagcgagcgcgcagagagggagtggccaactccatcactaggggttcctgcggcctagtactaggctcagaggcacacaggagtttctgggctcaccctgcccccttccaacccctcagttcccatcctccagcagctgtttgtgtgctgcctctgaagtccacactgaacaaacttcagcctactcatgtccctaaaatgggcaaacattgcaagcagcaaacagcaaacacacagccctccctgcctgctgaccttggagctggggcagaggtcagagacctctctgggcccatgccacctccaacatccactcgaccccttggaatttcggtggagaggagcagaggttgtcctggcgtggtttaggtagtgtgagaggggtacccggggatcttgctaccagtggaacagccactaaggattctgcagtgagagcagagggccagctaagtggtactctcccagagactgtctgactcacgccaccccctccaccttggacacaggacgctgtggtttctgagccaggtacaatgactcctttcggtaagtgcagtggaagctgtacactgcccaggcaaagcgtccgggcagcgtaggcgggcgactcagatcccagccagtggacttagcccctgtttgctcctccgataactggggtgaccttggttaatattcaccagcagcctcccccgttgcccctctggatccactgcttaaatacggacgaggacagggccctgtctcctcagcttcaggcaccaccactgacctgggacagtgaatagatcttgagaacttcagggtgagtctatgggacccttgatgttttctttccccttcttttctatggttaagttcatgtcataggaaggggagaagtaacagggtacacatattgaccaaatcagggtaattttgcatttgtaattttaaaaaatgctttcttcttttaatatacttttttgtttatcttatttctaatactttccctaatctctttctttcagggcaataatgatacaatgtatcatgcctctttgcaccattctaaagaataacagtgataatttctgggttaaggcaatagcaatatttctgcatataaatatttctgcatataaattgtaactgatgtaagaggtttcatattgctaatagcagctacaatccagctaccattctgcttttattttctggttgggataaggctggattattctgagtccaagctaggcccttttgctaatcttgttcatacctcttatcttcctcccacagctcctgggcaacctgctggtctctctgctggcccatcactttggcaaagcactagtgccaccatggcctctaggctgactctgctgactctgctgctcctgctgctggctggggacagggccagctctaaccccaatgctacttctagctcctctcaggaccctgagagcctgcaggacaggggggagggcaaggtggccaccactgtgatctctaagatgctgtttgtggagcccatcctggaggtgagcagcctgcccaccaccaacagcaccaccaactctgccactaagatcactgccaacaccactgatgagcccaccacccagcccactactgagcccaccacccagcctactatccagcccacccagcccactacccagctgcccactgacagccctacccagcccaccactggcagcttctgccctgggcctgtgaccctgtgctctgacctggagagccattctactgaggctgtgctgggggatgccctggtggacttctctctgaagctgtaccatgctttctctgccatgaagaaggtggagactaacatggcttttagccccttcagcattgctagcctgctgacccaggtgctgctgggggctggggagaacactaagaccaacctggaatctatcctgagctaccccaaggacttcacctgtgtgcaccaggccctgaagggcttcaccaccaagggggtgacctctgtgagccagatcttccacagccctgacctggccatcagggatacttttgtgaatgccagcagaaccctgtactcttctagccccagggtgctgagcaataattctgatgctaacctggagctgatcaatacctgggtggctaagaataccaacaacaagattagcaggctgctggactctctgccttctgataccaggctggtgctgctgaatgccatttacctgtctgccaagtggaagaccacttttgaccctaagaagactaggatggagcctttccacttcaagaactctgtcattaaggtgcccatgatgaacagcaagaagtatcctgtggcccactttattgaccagactctgaaggccaaggtgggccagctgcagctgagccataacctgagcctggtgatcctggtgccccagaacctgaagcataggctggaggacatggagcaggctctgagcccctctgtgttcaaggctattatggagaagctggagatgagcaagttccagcccactctgctgaccctgcccagaatcaaggtgaccacctctcaggacatgctgagcatcatggaaaagctggagttctttgacttttcttatgacctgaatctgtgtggcctgactgaggatcctgatctgcaggtgtctgccatgcagcaccagactgtgctggagctgactgagactggggtggaggctgctgctgcttctgccatctctgtggccaggaccctgctggtgtttgaggtgcagcagcccttcctgtttgtgctgtgggaccagcagcacaagtttcctgtgttcatgggcagggtgtatgaccccagagcctgacatctagaaatcaacctctggattacaaaatttgtgaaagattgactggtattcttaactatgttgctccttttacgctatgtggatacgctgctttaatgcctttgtatcatgctattgcttcccgtatggctttcattttctcctccttgtataaatcctggttgctgtctctttatgaggagttgtggcccgttgtcaggcaacgtggcgtggtgtgcactgtgtttgctgacgcaacccccactggttggggcattgccaccacctgtcagctcctttccgggactttcgctttccccctccctattgccacggcggaactcatcgccgcctgccttgcccgctgctggacaggggctcggctgttgggcactgacaattccgtggtgttgtcggggaagctgacgtcctttccatggctgctcgcctgtgttgccacctggattctgcgcgggacgtccttctgctacgtcccttcggccctcaatccagcggaccttccttcccgcggcctgctgccggctctgcggcctcttccgcgtcttcgccttcgccctcagacgagtcggatctccctttgggccgcctccccgctctagagctgaattcctgcagccagggggatcagcctctactgtgccttctagttgccagccatctgttgtttgcccctcccccttgccttccttgaccctggaaggtgccactcccactgtcctttcctaataaaatgaggaaattgcatcacattgtctgagtaggtgtcattctattctggggggtggggtggggcaggacagcaagggggaggattgggaagacaatagcaggcatgctggggatgcagtgggctctatggcttctgaggcagaaagaaccagctggggctcgagatccactagggccgcaggaacccctagtgatggagttggccactccctctctgcgcgctcgctcgctcactgaggccgggcgaccaaaggtcgcccgacgcccgggctttgcccgggcggcctcagtgagcgagcgagcgcgcag

SEQ ID NO: 43 - DNA, 3949 bp, Artificial Sequence
  pSwap_ApoE_hAAT_HBB2m1_SERPING1co21_WPREco1_BGH228
ctgcgcgctcgctcgctcactgaggccgcccgggcaaagcccgggcggcctcagtgagcgagcgagcgcgcagagagggagtggccaactccatcactaggggttcctgcggcctagtactaggctcagaggcacacaggagtttctgggctcaccctgcccccttccaacccctcagttcccatcctccagcagctgtttgtgtgctgcctctgaagtccacactgaacaaacttcagcctactcatgtccctaaaatgggcaaacattgcaagcagcaaacagcaaacacacagccctccctgcctgctgaccttggagctggggcagaggtcagagacctctctgggcccatgccacctccaacatccactcgaccccttggaatttcggtggagaggagcagaggttgtcctggcgtggtttaggtagtgtgagaggggtacccggggatcttgctaccagtggaacagccactaaggattctgcagtgagagcagagggccagctaagtggtactctcccagagactgtctgactcacgccaccccctccaccttggacacaggacgctgtggtttctgagccaggtacaatgactcctttcggtaagtgcagtggaagctgtacactgcccaggcaaagcgtccgggcagcgtaggcgggcgactcagatcccagccagtggacttagcccctgtttgctcctccgataactggggtgaccttggttaatattcaccagcagcctcccccgttgcccctctggatccactgcttaaatacggacgaggacagggccctgtctcctcagcttcaggcaccaccactgacctgggacagtgaatagatcttgagaacttcagggtgagtctatgggacccttgatgttttctttccccttcttttctatggttaagttcatgtcataggaaggggagaagtaacagggtacacatattgaccaaatcagggtaattttgcatttgtaattttaaaaaatgctttcttcttttaatatacttttttgtttatcttatttctaatactttccctaatctctttctttcagggcaataatgatacaatgtatcatgcctctttgcaccattctaaagaataacagtgataatttctgggttaaggcaatagcaatatttctgcatataaatatttctgcatataaattgtaactgatgtaagaggtttcatattgctaatagcagctacaatccagctaccattctgcttttattttctggttgggataaggctggattattctgagtccaagctaggcccttttgctaatcttgttcatacctcttatcttcctcccacagctcctgggcaacctgctggtctctctgctggcccatcactttggcaaagcactagtgccaccatggcctctaggctgactctgctgactctgctgctcctgctgctggctggggacagggccagctctaaccccaatgctacttctagctcctctcaggaccctgagagcctgcaggacaggggggagggcaaggtggccaccactgtgatctctaagatgctgtttgtggagcccatcctggaggtgagcagcctgcccaccaccaacagcaccaccaactctgccactaagatcactgccaacaccactgatgagcccaccacccagcccactactgagcccaccacccagcctactatccagcccacccagcccactacccagctgcccactgacagccctacccagcccaccactggcagcttctgccctgggcctgtgaccctgtgctctgacctggagagccattctactgaggctgtgctgggggatgccctggtggacttctctctgaagctgtaccatgctttctctgccatgaagaaggtggagactaacatggcttttagccccttcagcattgctagcctgctgacccaggtgctgctgggggctggggagaacactaagaccaacctggaatctatcctgagctaccccaaggacttcacctgtgtgcaccaggccctgaagggcttcaccaccaagggggtgacctctgtgagccagatcttccacagccctgacctggccatcagggatacttttgtgaatgccagcagaaccctgtactcttctagccccagggtgctgagcaataattctgatgctaacctggagctgatcaatacctgggtggctaagaataccaacaacaagattagcaggctgctggactctctgccttctgataccaggctggtgctgctgaatgccatttacctgtctgccaagtggaagaccacttttgaccctaagaagactaggatggagcctttccacttcaagaactctgtcattaaggtgcccatgatgaacagcaagaagtatcctgtggcccactttattgaccagactctgaaggccaaggtgggccagctgcagctgagccataacctgagcctggtgatcctggtgccccagaacctgaagcataggctggaggacatggagcaggctctgagcccctctgtgttcaaggctattatggagaagctggagatgagcaagttccagcccactctgctgaccctgcccagaatcaaggtgaccacctctcaggacatgctgagcatcatggaaaagctggagttctttgacttttcttatgacctgaatctgtgtggcctgactgaggatcctgatctgcaggtgtctgccatgcagcaccagactgtgctggagctgactgagactggggtggaggctgctgctgcttctgccatctctgtggccaggaccctgctggtgtttgaggtgcagcagcccttcctgtttgtgctgtgggaccagcagcacaagtttcctgtgttcatgggcagggtgtatgaccccagagcctgacatctagaaatcaacctctggattacaaaatttgtgaaagattgactggtattcttaactatgttgctccttttatgctatgtggatatgctgctttaatgcctttgtatcatgctattgcttcctgtatggctttcattttctcctccttgtataaatcctggttgctgtctctttatgaggagttgtggcctgttgtcaggcaatgtggtgtggtgtgcactgtgtttgctgatgcaacccccactggttggggcattgccaccacctgtcagctcctttctgggacttttgctttccccctccctattgccatggtggaactcattgctgcctgccttgcctgctgctggacaggggcttggctgttgggcactgacaattctgtggtgttgttggggaagctgatgtcctttccatggctgcttgcctgtgttgccacctggattctgtgtgggatgtccttctgctatgtccctttggccctcaatccagtggaccttccttcctgtggcctgctgctggctctgtggcctcttctgtgtctttgcctttgccctcagatgagttggatctccctttgggctgcctccctgctctagagctgaattcctgcagccagggggatcagcctctactgtgccttctagttgccagccatctgttgtttgcccctcccccttgccttccttgaccctggaaggtgccactcccactgtcctttcctaataaaatgaggaaattgcatcacattgtctgagtaggtgtcattctattctggggggtggggtggggcaggacagcaagggggaggattgggaagacaatagcaggcatgctggggatgcagtgggctctatggcttctgaggcagaaagaaccagctggggctcgagatccactagggccgcaggaacccctagtgatggagttggccactccctctctgcgcgctcgctcgctcactgaggccgggcgaccaaaggtcgcccgacgcccgggctttgcccgggcggcctcagtgagcgagcgagcgcgcag

SEQ ID NO: 44 - DNA, 3354 bp, Artificial Sequence
  pSwap_ApoE_hAAT_HBB2m1(-ATG)_SERPING1co21_BGH228
ctgcgcgctcgctcgctcactgaggccgcccgggcaaagcccgggcggcctcagtgagcgagcgagcgcgcagagagggagtggccaactccatcactaggggttcctgcggcctagtactaggctcagaggcacacaggagtttctgggctcaccctgcccccttccaacccctcagttcccatcctccagcagctgtttgtgtgctgcctctgaagtccacactgaacaaacttcagcctactcatgtccctaaaatgggcaaacattgcaagcagcaaacagcaaacacacagccctccctgcctgctgaccttggagctggggcagaggtcagagacctctctgggcccatgccacctccaacatccactcgaccccttggaatttcggtggagaggagcagaggttgtcctggcgtggtttaggtagtgtgagaggggtacccggggatcttgctaccagtggaacagccactaaggattctgcagtgagagcagagggccagctaagtggtactctcccagagactgtctgactcacgccaccccctccaccttggacacaggacgctgtggtttctgagccaggtacaatgactcctttcggtaagtgcagtggaagctgtacactgcccaggcaaagcgtccgggcagcgtaggcgggcgactcagatcccagccagtggacttagcccctgtttgctcctccgataactggggtgaccttggttaatattcaccagcagcctcccccgttgcccctctggatccactgcttaaatacggacgaggacagggccctgtctcctcagcttcaggcaccaccactgacctgggacagtgaatagatcctgagaacttcagggtgagtctttgggacccttgttgttttctttccccttcttttctttggttaagttcttgtcataggaaggggagaagtaacagggtacacatattgaccaaatcagggtaattttgcatttgtaattttaaaaattgctttcttcttttaatatacttttttgtttatcttatttctaatactttccctaatctctttctttcagggcaatattgatacattgtatcttgcctctttgcaccattctaaagaataacagtgataatttctgggttaaggcaatagcaatatttctgcatataaatatttctgcatataaattgtaactgttgtaagaggtttcatattgctaatagcagctacaatccagctaccattctgcttttattttctggttgggataaggctggattattctgagtccaagctaggcccttttgctaatcttgttcatacctcttatcttcctcccacagctcctgggcaacctgctggtctctctgctggcccatcactttggcaaagcactagtgccaccatggcctctaggctgactctgctgactctgctgctcctgctgctggctggggacagggccagctctaaccccaatgctacttctagctcctctcaggaccctgagagcctgcaggacaggggggagggcaaggtggccaccactgtgatctctaagatgctgtttgtggagcccatcctggaggtgagcagcctgcccaccaccaacagcaccaccaactctgccactaagatcactgccaacaccactgatgagcccaccacccagcccactactgagcccaccacccagcctactatccagcccacccagcccactacccagctgcccactgacagccctacccagcccaccactggcagcttctgccctgggcctgtgaccctgtgctctgacctggagagccattctactgaggctgtgctgggggatgccctggtggacttctctctgaagctgtaccatgctttctctgccatgaagaaggtggagactaacatggcttttagccccttcagcattgctagcctgctgacccaggtgctgctgggggctggggagaacactaagaccaacctggaatctatcctgagctaccccaaggacttcacctgtgtgcaccaggccctgaagggcttcaccaccaagggggtgacctctgtgagccagatcttccacagccctgacctggccatcagggatacttttgtgaatgccagcagaaccctgtactcttctagccccagggtgctgagcaataattctgatgctaacctggagctgatcaatacctgggtggctaagaataccaacaacaagattagcaggctgctggactctctgccttctgataccaggctggtgctgctgaatgccatttacctgtctgccaagtggaagaccacttttgaccctaagaagactaggatggagcctttccacttcaagaactctgtcattaaggtgcccatgatgaacagcaagaagtatcctgtggcccactttattgaccagactctgaaggccaaggtgggccagctgcagctgagccataacctgagcctggtgatcctggtgccccagaacctgaagcataggctggaggacatggagcaggctctgagcccctctgtgttcaaggctattatggagaagctggagatgagcaagttccagcccactctgctgaccctgcccagaatcaaggtgaccacctctcaggacatgctgagcatcatggaaaagctggagttctttgacttttcttatgacctgaatctgtgtggcctgactgaggatcctgatctgcaggtgtctgccatgcagcaccagactgtgctggagctgactgagactggggtggaggctgctgctgcttctgccatctctgtggccaggaccctgctggtgtttgaggtgcagcagcccttcctgtttgtgctgtgggaccagcagcacaagtttcctgtgttcatgggcagggtgtatgaccccagagcctgacatctagagctgaattcctgcagccagggggatcagcctctactgtgccttctagttgccagccatctgttgtttgcccctcccccttgccttccttgaccctggaaggtgccactcccactgtcctttcctaataaaatgaggaaattgcatcacattgtctgagtaggtgtcattctattctggggggtggggtggggcaggacagcaagggggaggattgggaagacaatagcaggcatgctggggatgcagtgggctctatggcttctgaggcagaaagaaccagctggggctcgagatccactagggccgcaggaacccctagtgatggagttggccactccctctctgcgcgctcgctcgctcactgaggccgggcgaccaaaggtcgcccgacgcccgggctttgcccgggcggcctcagtgagcgagcgagcgcgcag

SEQ ID NO: 45 - DNA, 4946 bp, Artificial Sequence
  pSwap_ApoE_hAAT_SERPING1co21(Intron 1-2, 2-3)_BGH228
ctgcgcgctcgctcgctcactgaggccgcccgggcaaagcccgggcggcctcagtgagcgagcgagcgcgcagagagggagtggccaactccatcactaggggttcctgcggcctagtactaggctcagaggcacacaggagtttctgggctcaccctgcccccttccaacccctcagttcccatcctccagcagctgtttgtgtgctgcctctgaagtccacactgaacaaacttcagcctactcatgtccctaaaatgggcaaacattgcaagcagcaaacagcaaacacacagccctccctgcctgctgaccttggagctggggcagaggtcagagacctctctgggcccatgccacctccaacatccactcgaccccttggaatttcggtggagaggagcagaggttgtcctggcgtggtttaggtagtgtgagaggggtacccggggatcttgctaccagtggaacagccactaaggattctgcagtgagagcagagggccagctaagtggtactctcccagagactgtctgactcacgccaccccctccaccttggacacaggacgctgtggtttctgagccaggtacaatgactcctttcggtaagtgcagtggaagctgtacactgcccaggcaaagcgtccgggcagcgtaggcgggcgactcagatcccagccagtggacttagcccctgtttgctcctccgataactggggtgaccttggttaatattcaccagcagcctcccccgttgcccctctggatccactgcttaaatacggacgaggacagggccctgtctcctcagcttcaggcaccaccactgacctgggacagtgaatagatctagtctgcactggagctgcctggtgaccagaagtttggagtaggtttggtgctgggcaggggtggggagtagggtggaaagcatggagtgaagaggtctagggagggggtctcctcacccccgccttcctgcccgccttgatctcgggggtctctataggcttgcttccacctgggacttctgcctcctcctaccccagcccctcccgcctcaggcctgttgtgctcagccccccaggacctcccctcccccacgcctctggcctcattgtttggttaaagcaggaccccctccccctcccaccacctcccctccgactgaacagatggacagagacccgggcccacggggagaggaagggccagccggtgccgggaaagggaagcggtttggggaaaacaaaacagagggaggagccagggagaaggtggccccaggagggaggaggagggaattcgctaagagggactggggcctgagacggaatgggggcgggccccgggcggggtgggggcccctgggctcccagggtgggagctggctccgaggctggctggctccgcaggtccgctgacgtcgccgcccagatggcctctaggctgactctgctgactctgctgctcctgctgctggctggggtatgtggtcccttgtgggatgggggacgggggtggagacgggaggcgggatggtgcggggtgcgggcggtggctgaggattaacccttcaggctccggggaatgaggagagctcctcttgggatcattgagtgtgatccttgcacacgcactcgtagatggtggaaagagctcaggactcagacagatgcaagttctaatcttggcgggccatgtaggagctgcgcagcgtggtcctgaggacgtcacttttctcagcctactcctcctgatttataaaatgttgaataaacagatcccaccctgtccaccaagcaggcttggcaggaggatcacatagggcaaggagatgggaagcattttgtgatatcaaagcaagagtttgttgtagaaaagagctgtggggaggagaggtttggctgctgtgacacagacggtggtcccaggctagggcctgtgaagacagggaagaatggtagcaaacatacgtgggtctgggtgggggtcaatagcagtgagaggtcccagtggtctgggaggtcatggactagaaataaggctaagaagtgcaggatcccaggagaaaggtaggtaggggtgtgtgtatgtgcgtgtgtgtgtgtgtgcacgcgcaagttggtatcacatactcagcagatgatgtagttatgagcagggagtttggaatcagagaccttgttttgacccctagctgtttctcccatttctgtgagaccctggactagttaatatgtgtcggtatgagtttctctacctgtgaaatggagctaatgcgtggtttctcagtggaggatctgttgacattggggctggataattcattgctgaggggctaccctgcgcattttaggatgttttgcagtatatctctagcctctacgcactagattccggtagcatcttccctgctgtctccctgtgacaaccaaaaatgtctctggacattgccaaatatcccctgggagtcaaaattgtttcagagccgctggcctatactacttctctctccctcccttcctgcctcccttctttcctccttccctttcttcgttcccttcctaatgtgtactgtttttccacacccactaatgggttgcaacccacagtttaaaaatttactgttctaaatcaaggagcacaagttcaaatgtctgtactagccaagcaagtgagtcaaacaggtagatatttacaggaaattgcaagaacatagataaatgacaacactcagcttcactgtttggaaaacaacttcctacagggcagtaattggtcagagattacagagtccctgactatccctcatcttctgcagagcacattcctgtgcacccccaccctcaccctgtattgccccttctctgaggaattagtggtggtggttctaagacagattgctcatctgccgcactgtcagaaattactctcttgtacaggacattttccacatccacaccttctcttcctgctttgagtattttagaggactgtgcctcgtagtaagaaaaaaatgaaactcagtttcttgaaccacaggacagggccagctctaaccccaatgctacttctagctcctctcaggaccctgagagcctgcaggacaggggggagggcaaggtggccaccactgtgatctctaagatgctgtttgtggagcccatcctggaggtgagcagcctgcccaccaccaacagcaccaccaactctgccactaagatcactgccaacaccactgatgagcccaccacccagcccactactgagcccaccacccagcctactatccagcccacccagcccactacccagctgcccactgacagccctacccagcccaccactggcagcttctgccctgggcctgtgaccctgtgctctgacctggagagccattctactgaggctgtgctgggggatgccctggtggacttctctctgaagctgtaccatgctttctctgccatgaagaaggtggagactaacatggcttttagccccttcagcattgctagcctgctgacccaggtgctgctgggggctggggagaacactaagaccaacctggaatctatcctgagctaccccaaggacttcacctgtgtgcaccaggccctgaagggcttcaccaccaagggggtgacctctgtgagccagatcttccacagccctgacctggccatcagggatacttttgtgaatgccagcagaaccctgtactcttctagccccagggtgctgagcaataattctgatgctaacctggagctgatcaatacctgggtggctaagaataccaacaacaagattagcaggctgctggactctctgccttctgataccaggctggtgctgctgaatgccatttacctgtctgccaagtggaagaccacttttgaccctaagaagactaggatggagcctttccacttcaagaactctgtcattaaggtgcccatgatgaacagcaagaagtatcctgtggcccactttattgaccagactctgaaggccaaggtgggccagctgcagctgagccataacctgagcctggtgatcctggtgccccagaacctgaagcataggctggaggacatggagcaggctctgagcccctctgtgttcaaggctattatggagaagctggagatgagcaagttccagcccactctgctgaccctgcccagaatcaaggtgaccacctctcaggacatgctgagcatcatggaaaagctggagttctttgacttttcttatgacctgaatctgtgtggcctgactgaggatcctgatctgcaggtgtctgccatgcagcaccagactgtgctggagctgactgagactggggtggaggctgctgctgcttctgccatctctgtggccaggaccctgctggtgtttgaggtgcagcagcccttcctgtttgtgctgtgggaccagcagcacaagtttcctgtgttcatgggcagggtgtatgaccccagagcctgacatctagagctgaattcctgcagccagggggatcagcctctactgtgccttctagttgccagccatctgttgtttgcccctcccccttgccttccttgaccctggaaggtgccactcccactgtcctttcctaataaaatgaggaaattgcatcacattgtctgagtaggtgtcattctattctggggggtggggtggggcaggacagcaagggggaggattgggaagacaatagcaggcatgctggggatgcagtgggctctatggcttctgaggcagaaagaaccagctggggctcgagatccactagggccgcaggaacccctagtgatggagttggccactccctctctgcgcgctcgctcgctcactgaggccgggcgaccaaaggtcgcccgacgcccgggctttgcccgggcggcctcagtgagcgagcgagcgcgcag

SEQ ID NO: 46 - DNA, 4911 bp, Artificial Sequence
  pSwap_ApoE_hAAT_HBB2m1_SERPING1co21(Intron 2-3)_BGH228
ctgcgcgctcgctcgctcactgaggccgcccgggcaaagcccgggcggcctcagtgagcgagcgagcgcgcagagagggagtggccaactccatcactaggggttcctgcggcctagtactaggctcagaggcacacaggagtttctgggctcaccctgcccccttccaacccctcagttcccatcctccagcagctgtttgtgtgctgcctctgaagtccacactgaacaaacttcagcctactcatgtccctaaaatgggcaaacattgcaagcagcaaacagcaaacacacagccctccctgcctgctgaccttggagctggggcagaggtcagagacctctctgggcccatgccacctccaacatccactcgaccccttggaatttcggtggagaggagcagaggttgtcctggcgtggtttaggtagtgtgagaggggtacccggggatcttgctaccagtggaacagccactaaggattctgcagtgagagcagagggccagctaagtggtactctcccagagactgtctgactcacgccaccccctccaccttggacacaggacgctgtggtttctgagccaggtacaatgactcctttcggtaagtgcagtggaagctgtacactgcccaggcaaagcgtccgggcagcgtaggcgggcgactcagatcccagccagtggacttagcccctgtttgctcctccgataactggggtgaccttggttaatattcaccagcagcctcccccgttgcccctctggatccactgcttaaatacggacgaggacagggccctgtctcctcagcttcaggcaccaccactgacctgggacagtgaatagatcttgagaacttcagggtgagtctatgggacccttgatgttttctttccccttcttttctatggttaagttcatgtcataggaaggggagaagtaacagggtacacatattgaccaaatcagggtaattttgcatttgtaattttaaaaaatgctttcttcttttaatatacttttttgtttatcttatttctaatactttccctaatctctttctttcagggcaataatgatacaatgtatcatgcctctttgcaccattctaaagaataacagtgataatttctgggttaaggcaatagcaatatttctgcatataaatatttctgcatataaattgtaactgatgtaagaggtttcatattgctaatagcagctacaatccagctaccattctgcttttattttctggttgggataaggctggattattctgagtccaagctaggcccttttgctaatcttgttcatacctcttatcttcctcccacagctcctgggcaacctgctggtctctctgctggcccatcactttggcaaagcactagtgccaccatggcctctaggctgactctgctgactctgctgctcctgctgctggctggggtatgtggtcccttgtgggatgggggacgggggtggagacgggaggcgggatggtgcggggtgcgggcggtggctgaggattaacccttcaggctccggggaatgaggagagctcctcttgggatcattgagtgtgatccttgcacacgcactcgtagatggtggaaagagctcaggactcagacagatgcaagttctaatcttggcgggccatgtaggagctgcgcagcgtggtcctgaggacgtcacttttctcagcctactcctcctgatttataaaatgttgaataaacagatcccaccctgtccaccaagcaggcttggcaggaggatcacatagggcaaggagatgggaagcattttgtgatatcaaagcaagagtttgttgtagaaaagagctgtggggaggagaggtttggctgctgtgacacagacggtggtcccaggctagggcctgtgaagacagggaagaatggtagcaaacatacgtgggtctgggtgggggtcaatagcagtgagaggtcccagtggtctgggaggtcatggactagaaataaggctaagaagtgcaggatcccaggagaaaggtaggtaggggtgtgtgtatgtgcgtgtgtgtgtgtgtgcacgcgcaagttggtatcacatactcagcagatgatgtagttatgagcagggagtttggaatcagagaccttgttttgacccctagctgtttctcccatttctgtgagaccctggactagttaatatgtgtcggtatgagtttctctacctgtgaaatggagctaatgcgtggtttctcagtggaggatctgttgacattggggctggataattcattgctgaggggctaccctgcgcattttaggatgttttgcagtatatctctagcctctacgcactagattccggtagcatcttccctgctgtctccctgtgacaaccaaaaatgtctctggacattgccaaatatcccctgggagtcaaaattgtttcagagccgctggcctatactacttctctctccctcccttcctgcctcccttctttcctccttccctttcttcgttcccttcctaatgtgtactgtttttccacacccactaatgggttgcaacccacagtttaaaaatttactgttctaaatcaaggagcacaagttcaaatgtctgtactagccaagcaagtgagtcaaacaggtagatatttacaggaaattgcaagaacatagataaatgacaacactcagcttcactgtttggaaaacaacttcctacagggcagtaattggtcagagattacagagtccctgactatccctcatcttctgcagagcacattcctgtgcacccccaccctcaccctgtattgccccttctctgaggaattagtggtggtggttctaagacagattgctcatctgccgcactgtcagaaattactctcttgtacaggacattttccacatccacaccttctcttcctgctttgagtattttagaggactgtgcctcgtagtaagaaaaaaatgaaactcagtttcttgaaccacaggacagggccagctctaaccccaatgctacttctagctcctctcaggaccctgagagcctgcaggacaggggggagggcaaggtggccaccactgtgatctctaagatgctgtttgtggagcccatcctggaggtgagcagcctgcccaccaccaacagcaccaccaactctgccactaagatcactgccaacaccactgatgagcccaccacccagcccactactgagcccaccacccagcctactatccagcccacccagcccactacccagctgcccactgacagccctacccagcccaccactggcagcttctgccctgggcctgtgaccctgtgctctgacctggagagccattctactgaggctgtgctgggggatgccctggtggacttctctctgaagctgtaccatgctttctctgccatgaagaaggtggagactaacatggcttttagccccttcagcattgctagcctgctgacccaggtgctgctgggggctggggagaacactaagaccaacctggaatctatcctgagctaccccaaggacttcacctgtgtgcaccaggccctgaagggcttcaccaccaagggggtgacctctgtgagccagatcttccacagccctgacctggccatcagggatacttttgtgaatgccagcagaaccctgtactcttctagccccagggtgctgagcaataattctgatgctaacctggagctgatcaatacctgggtggctaagaataccaacaacaagattagcaggctgctggactctctgccttctgataccaggctggtgctgctgaatgccatttacctgtctgccaagtggaagaccacttttgaccctaagaagactaggatggagcctttccacttcaagaactctgtcattaaggtgcccatgatgaacagcaagaagtatcctgtggcccactttattgaccagactctgaaggccaaggtgggccagctgcagctgagccataacctgagcctggtgatcctggtgccccagaacctgaagcataggctggaggacatggagcaggctctgagcccctctgtgttcaaggctattatggagaagctggagatgagcaagttccagcccactctgctgaccctgcccagaatcaaggtgaccacctctcaggacatgctgagcatcatggaaaagctggagttctttgacttttcttatgacctgaatctgtgtggcctgactgaggatcctgatctgcaggtgtctgccatgcagcaccagactgtgctggagctgactgagactggggtggaggctgctgctgcttctgccatctctgtggccaggaccctgctggtgtttgaggtgcagcagcccttcctgtttgtgctgtgggaccagcagcacaagtttcctgtgttcatgggcagggtgtatgaccccagagcctgacatctagagctgaattcctgcagccagggggatcagcctctactgtgccttctagttgccagccatctgttgtttgcccctcccccttgccttccttgaccctggaaggtgccactcccactgtcctttcctaataaaatgaggaaattgcatcacattgtctgagtaggtgtcattctattctggggggtggggtggggcaggacagcaagggggaggattgggaagacaatagcaggcatgctggggatgcagtgggctctatggcttctgaggcagaaagaaccagctggggctcgagatccactagggccgcaggaacccctagtgatggagttggccactccctctctgcgcgctcgctcgctcactgaggccgggcgaccaaaggtcgcccgacgcccgggctttgcccgggcggcctcagtgagcgagcgagcgcgcag

SEQ ID NO: 47 - DNA, 5011 bp, Artificial Sequence
  pSwap_ApoE_hAAT_HBB2m1_SERPING1co21(Intron 3-4)_BGH228
ctgcgcgctcgctcgctcactgaggccgcccgggcaaagcccgggcggcctcagtgagcgagcgagcgcgcagagagggagtggccaactccatcactaggggttcctgcggcctagtactaggctcagaggcacacaggagtttctgggctcaccctgcccccttccaacccctcagttcccatcctccagcagctgtttgtgtgctgcctctgaagtccacactgaacaaacttcagcctactcatgtccctaaaatgggcaaacattgcaagcagcaaacagcaaacacacagccctccctgcctgctgaccttggagctggggcagaggtcagagacctctctgggcccatgccacctccaacatccactcgaccccttggaatttcggtggagaggagcagaggttgtcctggcgtggtttaggtagtgtgagaggggtacccggggatcttgctaccagtggaacagccactaaggattctgcagtgagagcagagggccagctaagtggtactctcccagagactgtctgactcacgccaccccctccaccttggacacaggacgctgtggtttctgagccaggtacaatgactcctttcggtaagtgcagtggaagctgtacactgcccaggcaaagcgtccgggcagcgtaggcgggcgactcagatcccagccagtggacttagcccctgtttgctcctccgataactggggtgaccttggttaatattcaccagcagcctcccccgttgcccctctggatccactgcttaaatacggacgaggacagggccctgtctcctcagcttcaggcaccaccactgacctgggacagtgaatagatcttgagaacttcagggtgagtctatgggacccttgatgttttctttccccttcttttctatggttaagttcatgtcataggaaggggagaagtaacagggtacacatattgaccaaatcagggtaattttgcatttgtaattttaaaaaatgctttcttcttttaatatacttttttgtttatcttatttctaatactttccctaatctctttctttcagggcaataatgatacaatgtatcatgcctctttgcaccattctaaagaataacagtgataatttctgggttaaggcaatagcaatatttctgcatataaatatttctgcatataaattgtaactgatgtaagaggtttcatattgctaatagcagctacaatccagctaccattctgcttttattttctggttgggataaggctggattattctgagtccaagctaggcccttttgctaatcttgttcatacctcttatcttcctcccacagctcctgggcaacctgctggtctctctgctggcccatcactttggcaaagcactagtgccaccatggcctctaggctgactctgctgactctgctgctcctgctgctggctggggacagggccagctctaaccccaatgctacttctagctcctctcaggaccctgagagcctgcaggacaggggggagggcaaggtggccaccactgtgatctctaagatgctgtttgtggagcccatcctggaggtgagcagcctgcccaccaccaacagcaccaccaactctgccactaagatcactgccaacaccactgatgagcccaccacccagcccactactgagcccaccacccagcctactatccagcccacccagcccactacccagctgcccactgacagccctacccagcccaccactggcagcttctgccctgggcctgtgaccctgtgctctgacctggagagccattctactgaggctgtgctgggggatgccctggtggacttctctctgaagctgtaccatgctttctctgccatgaagaaggtggagactaacatggcttttagccccttcagcattgctagcctgctgacccaggtgctgctgggtaagaccctgcttgaattctctccaggtcatttgttggacactcccataagagtcaccaatccagacacttacaaagccatgcctctgggaagaagctgtaaaaatgggctattatatattgggggtggggtagagggatgtatcttttcattcttgaacattccatcatttcacagtgatgtaataggcacgattgcttgtaaaactctgtgactatacaagaacatataaaataaggtcgcagccactaaccatgtttcatggcaaggagaggtgataagaaagatgaaattaggcgcagtggctcacgcctgtaatcccagcactttgggaggccaaggcgggtggatcacctgaggtcaggagttcaagaccagcctggccaacatggtgaaaccctgtctctactaaaaatacaaaaattatcagggagtggtggtgcatgcctgtaatcccagctacttgggcagctgaggcaggagaatcgcttgaacccaggaggtggaggttgcagtgagccgagaccgcaccattgcactacagtctgggtgacagagcgagactctgtctcaaaaaaaaaaaaaaattatcagagatagacctagagtagatgtggttagtactgccttctagctctgtgaccttgggcagatcactttaacctctctgagccttgagtcctcttgtgtaaaatagtgatgatgctatctacctcaaaagattaagaagcagaaagccaggccggatgcggtggttcacacctgtaatcccagcattttaggaggccgaggcgggcagatcacgaggtcaggagttcgagaccagcctgactaacatggtgaaaccccgtctctactaaaaataaaaagaaattagctaggcatggtggtgcacacctgtaaccccagctactcaggaggctgaggcaggagaatcacttgaacacgggaggcagaggttgcagtgagccgaaatcatgccactgcactccagcctgggaagactgagcaagactctgtctcaaaaaaaaaaaagaagcagcctagtgtctgacttagtgggaggtcaaaaaaatgtaaatcctctgccatcttgagggattactgtcaagtcccatttggtaattaccctaggaatggcacaaacaaattactacaagcagtggggacagagctattactccccagagagaattctaaaaaggctacagaatctttcttggctgggcacggtgactcacacctataatcctggcactttgggaggccaaggcaggagttcaagaccagcctggccaacatgttgaaaccccatctctactaaaaatgcaaaaattagccaggcatagtgatgcatgcttattgtcccagctacttgggaggcagaggtgggaggattgcttgaacctggagattcaagtgagctgagattgcaccactgcattccagcctgggcaacaaagcaagactctgtctcaaaaaaaaaaaaaaaaaaaaaaaaaagagagattgagagaacacttccagctcagatgatctgtgatcccctccaaagcagggaataccctccattccagcctggtccccaaccctcattcccaaggaaggcccccgactcatcctgcaagtatctttcatctctgccctttgttgcaggggctggggagaacactaagaccaacctggaatctatcctgagctaccccaaggacttcacctgtgtgcaccaggccctgaagggcttcaccaccaagggggtgacctctgtgagccagatcttccacagccctgacctggccatcagggatacttttgtgaatgccagcagaaccctgtactcttctagccccagggtgctgagcaataattctgatgctaacctggagctgatcaatacctgggtggctaagaataccaacaacaagattagcaggctgctggactctctgccttctgataccaggctggtgctgctgaatgccatttacctgtctgccaagtggaagaccacttttgaccctaagaagactaggatggagcctttccacttcaagaactctgtcattaaggtgcccatgatgaacagcaagaagtatcctgtggcccactttattgaccagactctgaaggccaaggtgggccagctgcagctgagccataacctgagcctggtgatcctggtgccccagaacctgaagcataggctggaggacatggagcaggctctgagcccctctgtgttcaaggctattatggagaagctggagatgagcaagttccagcccactctgctgaccctgcccagaatcaaggtgaccacctctcaggacatgctgagcatcatggaaaagctggagttctttgacttttcttatgacctgaatctgtgtggcctgactgaggatcctgatctgcaggtgtctgccatgcagcaccagactgtgctggagctgactgagactggggtggaggctgctgctgcttctgccatctctgtggccaggaccctgctggtgtttgaggtgcagcagcccttcctgtttgtgctgtgggaccagcagcacaagtttcctgtgttcatgggcagggtgtatgaccccagagcctgacatctagagctgaattcctgcagccagggggatcagcctctactgtgccttctagttgccagccatctgttgtttgcccctcccccttgccttccttgaccctggaaggtgccactcccactgtcctttcctaataaaatgaggaaattgcatcacattgtctgagtaggtgtcattctattctggggggtggggtggggcaggacagcaagggggaggattgggaagacaatagcaggcatgctggggatgcagtgggctctatggcttctgaggcagaaagaaccagctggggctcgagatccactagggccgcaggaacccctagtgatggagttggccactccctctctgcgcgctcgctcgctcactgaggccgggcgaccaaaggtcgcccgacgcccgggctttgcccgggcggcctcagtgagcgagcgagcgcgcag

SEQ ID NO: 48 - DNA, 4920 bp, Artificial Sequence
  pSwap_ApoE_hAAT_HBB2m1_SERPING1co21.P2A.SERPING1co24_BGH228
ctgcgcgctcgctcgctcactgaggccgcccgggcaaagcccgggcggcctcagtgagcgagcgagcgcgcagagagggagtggccaactccatcactaggggttcctgcggcctagtactaggctcagaggcacacaggagtttctgggctcaccctgcccccttccaacccctcagttcccatcctccagcagctgtttgtgtgctgcctctgaagtccacactgaacaaacttcagcctactcatgtccctaaaatgggcaaacattgcaagcagcaaacagcaaacacacagccctccctgcctgctgaccttggagctggggcagaggtcagagacctctctgggcccatgccacctccaacatccactcgaccccttggaatttcggtggagaggagcagaggttgtcctggcgtggtttaggtagtgtgagaggggtacccggggatcttgctaccagtggaacagccactaaggattctgcagtgagagcagagggccagctaagtggtactctcccagagactgtctgactcacgccaccccctccaccttggacacaggacgctgtggtttctgagccaggtacaatgactcctttcggtaagtgcagtggaagctgtacactgcccaggcaaagcgtccgggcagcgtaggcgggcgactcagatcccagccagtggacttagcccctgtttgctcctccgataactggggtgaccttggttaatattcaccagcagcctcccccgttgcccctctggatccactgcttaaatacggacgaggacagggccctgtctcctcagcttcaggcaccaccactgacctgggacagtgaatagatcttgagaacttcagggtgagtctatgggacccttgatgttttctttccccttcttttctatggttaagttcatgtcataggaaggggagaagtaacagggtacacatattgaccaaatcagggtaattttgcatttgtaattttaaaaaatgctttcttcttttaatatacttttttgtttatcttatttctaatactttccctaatctctttctttcagggcaataatgatacaatgtatcatgcctctttgcaccattctaaagaataacagtgataatttctgggttaaggcaatagcaatatttctgcatataaatatttctgcatataaattgtaactgatgtaagaggtttcatattgctaatagcagctacaatccagctaccattctgcttttattttctggttgggataaggctggattattctgagtccaagctaggcccttttgctaatcttgttcatacctcttatcttcctcccacagctcctgggcaacctgctggtctctctgctggcccatcactttggcaaagcactagtgccaccatggcctctaggctgactctgctgactctgctgctcctgctgctggctggggacagggccagctctaaccccaatgctacttctagctcctctcaggaccctgagagcctgcaggacaggggggagggcaaggtggccaccactgtgatctctaagatgctgtttgtggagcccatcctggaggtgagcagcctgcccaccaccaacagcaccaccaactctgccactaagatcactgccaacaccactgatgagcccaccacccagcccactactgagcccaccacccagcctactatccagcccacccagcccactacccagctgcccactgacagccctacccagcccaccactggcagcttctgccctgggcctgtgaccctgtgctctgacctggagagccattctactgaggctgtgctgggggatgccctggtggacttctctctgaagctgtaccatgctttctctgccatgaagaaggtggagactaacatggcttttagccccttcagcattgctagcctgctgacccaggtgctgctgggggctggggagaacactaagaccaacctggaatctatcctgagctaccccaaggacttcacctgtgtgcaccaggccctgaagggcttcaccaccaagggggtgacctctgtgagccagatcttccacagccctgacctggccatcagggatacttttgtgaatgccagcagaaccctgtactcttctagccccagggtgctgagcaataattctgatgctaacctggagctgatcaatacctgggtggctaagaataccaacaacaagattagcaggctgctggactctctgccttctgataccaggctggtgctgctgaatgccatttacctgtctgccaagtggaagaccacttttgaccctaagaagactaggatggagcctttccacttcaagaactctgtcattaaggtgcccatgatgaacagcaagaagtatcctgtggcccactttattgaccagactctgaaggccaaggtgggccagctgcagctgagccataacctgagcctggtgatcctggtgccccagaacctgaagcataggctggaggacatggagcaggctctgagcccctctgtgttcaaggctattatggagaagctggagatgagcaagttccagcccactctgctgaccctgcccagaatcaaggtgaccacctctcaggacatgctgagcatcatggaaaagctggagttctttgacttttcttatgacctgaatctgtgtggcctgactgaggatcctgatctgcaggtgtctgccatgcagcaccagactgtgctggagctgactgagactggggtggaggctgctgctgcttctgccatctctgtggccaggaccctgctggtgtttgaggtgcagcagcccttcctgtttgtgctgtgggaccagcagcacaagtttcctgtgttcatgggcagggtgtatgaccccagagctggctctggtgccaccaacttctccctgctcaagcaggcaggggatgtggaagagaatcctggacccatggctagcaggctgaccctgctgaccctgctgctcctgctgctggctggggacagggcctctagcaatcccaatgccacctctagctctagccaggatcctgagagcctgcaggacaggggggagggcaaggtggccaccactgtgatcagcaagatgctgtttgtggagcccattctggaggtgtcttctctgcccaccaccaatagcaccactaattctgccaccaagatcactgctaacaccactgatgagcccaccactcagcctaccactgagcccaccacccagcccactatccagcccacccagcccaccacccagctgcctactgacagccctacccagcccactactgggagcttctgccctggccctgtgaccctgtgctctgacctggagagccacagcactgaggctgtgctgggggatgccctggtggacttcagcctgaagctgtaccatgccttttctgccatgaagaaggtggagaccaacatggcctttagccctttcagcattgccagcctgctgactcaggtgctgctgggggctggggagaacaccaagaccaacctggagagcatcctgagctaccccaaggacttcacttgtgtgcaccaggccctgaagggcttcactaccaagggggtgacttctgtgagccagatcttccacagccctgacctggccatcagggatacttttgtgaatgccagcaggaccctgtacagcagcagccccagggtgctgagcaacaactctgatgctaacctggagctgatcaatacttgggtggccaagaacaccaacaacaagatttctaggctgctggactctctgccctctgacactaggctggtgctgctgaatgccatctacctgtctgccaagtggaagaccacctttgatcccaagaagactaggatggagcccttccacttcaagaactctgtgatcaaggtgcccatgatgaacagcaagaagtaccctgtggcccatttcattgaccagaccctgaaggccaaggtggggcagctgcagctgagccacaatctgagcctggtgattctggtgccccagaatctgaagcacagactggaggacatggagcaggctctgtctccctctgtgttcaaggccatcatggagaagctggagatgagcaagttccagcccactctgctgactctgcctaggatcaaggtgaccaccagccaggacatgctgagcattatggagaagctggagttctttgacttcagctatgacctgaacctgtgtggcctgactgaggaccctgatctgcaggtgtctgccatgcagcaccagactgtgctggagctgactgagactggggtggaggctgctgctgcctctgctatttctgtggccaggaccctgctggtgtttgaggtgcagcagcccttcctgtttgtgctgtgggaccagcagcacaagtttcctgtgttcatggggagggtgtatgaccccagggcctgacatctagagctgaattcctgcagccagggggatcagcctctactgtgccttctagttgccagccatctgttgtttgcccctcccccttgccttccttgaccctggaaggtgccactcccactgtcctttcctaataaaatgaggaaattgcatcacattgtctgagtaggtgtcattctattctggggggtggggtggggcaggacagcaagggggaggattgggaagacaatagcaggcatgctggggatgcagtgggctctatggcttctgaggcagaaagaaccagctggggctcgagatccactagggccgcaggaacccctagtgatggagttggccactccctctctgcgcgctcgctcgctcactgaggccgggcgaccaaaggtcgcccgacgcccgggctttgcccgggcggcctcagtgagcgagcgagcgcgcag

SEQ ID NO: 49 - DNA, 4030 bp, Artificial Sequence
  pAAV_ApoE_hAAT_HBB2m1_SERPING1.Fc_BGH228
ctgcgcgctcgctcgctcactgaggccgcccgggcaaagcccgggcggcctcagtgagcgagcgagcgcgcagagagggagtggccaactccatcactaggggttcctgcggcctagtaggctcagaggcacacaggagtttctgggctcaccctgcccccttccaacccctcagttcccatcctccagcagctgtttgtgtgctgcctctgaagtccacactgaacaaacttcagcctactcatgtccctaaaatgggcaaacattgcaagcagcaaacagcaaacacacagccctccctgcctgctgaccttggagctggggcagaggtcagagacctctctgggcccatgccacctccaacatccactcgaccccttggaatttcggtggagaggagcagaggttgtcctggcgtggtttaggtagtgtgagaggggtacccggggatcttgctaccagtggaacagccactaaggattctgcagtgagagcagagggccagctaagtggtactctcccagagactgtctgactcacgccaccccctccaccttggacacaggacgctgtggtttctgagccaggtacaatgactcctttcggtaagtgcagtggaagctgtacactgcccaggcaaagcgtccgggcagcgtaggcgggcgactcagatcccagccagtggacttagcccctgtttgctcctccgataactggggtgaccttggttaatattcaccagcagcctcccccgttgcccctctggatccactgcttaaatacggacgaggacagggccctgtctcctcagcttcaggcaccaccactgacctgggacagtgaatagatcctgagaacttcagggtgagtctatgggacccttgatgttttctttccccttcttttctatggttaagttcatgtcataggaaggggagaagtaacagggtacacatattgaccaaatcagggtaattttgcatttgtaattttaaaaaatgctttcttcttttaatatacttttttgtttatcttatttctaatactttccctaatctctttctttcagggcaataatgatacaatgtatcatgcctctttgcaccattctaaagaataacagtgataatttctgggttaaggcaatagcaatatttctgcatataaatatttctgcatataaattgtaactgatgtaagaggtttcatattgctaatagcagctacaatccagctaccattctgcttttattttctggttgggataaggctggattattctgagtccaagctaggcccttttgctaatcttgttcatacctcttatcttcctcccacagctcctgggcaacctgctggtctctctgctggcccatcactttggcaaagcacgcgtgccaccatggcctccaggctgaccctgctgaccctcctgctgctgctgctggctggggatagagcctcctcaaatccaaatgctaccagctccagctcccaggatccagagagtttgcaagacagaggcgaagggaaggtcgcaacaacagttatctccaagatgctattcgttgaacccatcctggaggtttccagcttgccgacaaccaactcaacaaccaattcagccaccaaaataacagctaataccactgatgaacccaccacacaacccaccacagagcccaccacccaacccaccatccaacccacccaaccaactacccagctcccaacagattctcctacccagcccactactgggtccttctgcccaggacctgttactctctgctctgacttggagagtcattcaacagaggccgtgttgggggatgctttggtagatttctccctgaagctctaccacgccttctcagcaatgaagaaggtggagaccaacatggccttttccccattcagcatcgccagcctccttacccaggtcctgctcggggctggggagaacaccaaaacaaacctggagagcatcctctcttaccccaaggacttcacctgtgtccaccaggccctgaagggcttcacgaccaaaggtgtcacctcagtctctcagattttccacagcccagacctggccataagggacacctttgtgaatgcctctcggaccctgtacagcagcagccccagagtcctaagcaacaacagtgacgccaacttggagctcatcaacacctgggtggccaagaacaccaacaacaagatcagccggctgctagacagtctgccctccgatacccgccttgtcctcctcaatgctatctacctgagtgccaagtggaagacaacatttgatcccaagaaaaccagaatggaaccctttcacttcaaaaactcagttataaaagtgcccatgatgaatagcaagaagtaccctgtggcccatttcattgaccaaactttgaaagccaaggtggggcagctgcagctctcccacaatctgagtttggtgatcctggtaccccagaacctgaaacatcgtcttgaagacatggaacaggctctcagcccttctgttttcaaggccatcatggagaaactggagatgtccaagttccagcccactctcctaacactaccccgcatcaaagtgacgaccagccaggatatgctctcaatcatggagaaattggaattcttcgatttttcttatgaccttaacctgtgtgggctgacagaggaccctgatcttcaggtttctgcgatgcagcaccagacagtgctggaactgacagagactggggtggaggcggctgcagcctccgccatctctgtggcccgcaccctgctggtctttgaagtgcagcagcccttcctcttcgtgctctgggaccagcagcacaagttccctgtcttcatggggcgagtatatgaccccagggccgacaaaactcacacatgcccaccgtgcccagcacctgaactcctggggggaccgtcagtcttcctcttccccccaaaacccaaggacaccctcatgatctcccggacccctgaggtcacatgcgtggtggtggacgtgagccacgaagaccctgaggtcaagttcaactggtacgtggacggcgtggaggtgcataatgccaagacaaagccgcgggaggagcagtacaacagcacgtaccgtgtggtcagcgtcctcaccgtcctgcaccaggactggctgaatggcaaggagtacaagtgcaaggtctccaacaaagccctcccagcccccatcgagaaaaccatctccaaagccaaagggcagccccgagaaccacaggtgtacaccctgcccccatcccgggatgagctgaccaagaaccaggtcagcctgacctgcctggtcaaaggcttctatcccagcgacatcgccgtggagtgggagagcaatgggcagccggagaacaactacaagaccacgcctcccgtgctggactccgacggctccttcttcctctacagcaagctcaccgtggacaagagcaggtggcagcaggggaacgtcttctcatgctccgtgatgcatgaggctctgcacaaccactacacgcagaagagcctctccctgtctccgggttgaagatctagagctgaattcctgcagccagggggatcagcctctactgtgccttctagttgccagccatctgttgtttgcccctcccccttgccttccttgaccctggaaggtgccactcccactgtcctttcctaataaaatgaggaaattgcatcacattgtctgagtaggtgtcattctattctggggggtggggtggggcaggacagcaagggggaggattgggaagacaatagcaggcatgctggggatgcagtgggctctatggcttctgaggcagaaagaaccagctggggctcgagatccactagggccgcaggaacccctagtgatggagttggccactccctctctgcgcgctcgctcgctcactgaggccgggcgaccaaaggtcgcccgacgcccgggctttgcccgggcggcctcagtgagcgagcgagcgcgcag

SEQ ID NO: 50 - DNA, 4030 bp, Artificial Sequence
  pAAV_ApoE_hAAT_HBB2m1_SERPING1.Fc(Ishino)_BGH228
ctgcgcgctcgctcgctcactgaggccgcccgggcaaagcccgggcggcctcagtgagcgagcgagcgcgcagagagggagtggccaactccatcactaggggttcctgcggcctagtaggctcagaggcacacaggagtttctgggctcaccctgcccccttccaacccctcagttcccatcctccagcagctgtttgtgtgctgcctctgaagtccacactgaacaaacttcagcctactcatgtccctaaaatgggcaaacattgcaagcagcaaacagcaaacacacagccctccctgcctgctgaccttggagctggggcagaggtcagagacctctctgggcccatgccacctccaacatccactcgaccccttggaatttcggtggagaggagcagaggttgtcctggcgtggtttaggtagtgtgagaggggtacccggggatcttgctaccagtggaacagccactaaggattctgcagtgagagcagagggccagctaagtggtactctcccagagactgtctgactcacgccaccccctccaccttggacacaggacgctgtggtttctgagccaggtacaatgactcctttcggtaagtgcagtggaagctgtacactgcccaggcaaagcgtccgggcagcgtaggcgggcgactcagatcccagccagtggacttagcccctgtttgctcctccgataactggggtgaccttggttaatattcaccagcagcctcccccgttgcccctctggatccactgcttaaatacggacgaggacagggccctgtctcctcagcttcaggcaccaccactgacctgggacagtgaatagatcctgagaacttcagggtgagtctatgggacccttgatgttttctttccccttcttttctatggttaagttcatgtcataggaaggggagaagtaacagggtacacatattgaccaaatcagggtaattttgcatttgtaattttaaaaaatgctttcttcttttaatatacttttttgtttatcttatttctaatactttccctaatctctttctttcagggcaataatgatacaatgtatcatgcctctttgcaccattctaaagaataacagtgataatttctgggttaaggcaatagcaatatttctgcatataaatatttctgcatataaattgtaactgatgtaagaggtttcatattgctaatagcagctacaatccagctaccattctgcttttattttctggttgggataaggctggattattctgagtccaagctaggcccttttgctaatcttgttcatacctcttatcttcctcccacagctcctgggcaacctgctggtctctctgctggcccatcactttggcaaagcacgcgtgccaccatggcctccaggctgaccctgctgaccctcctgctgctgctgctggctggggatagagcctcctcaaatccaaatgctaccagctccagctcccaggatccagagagtttgcaagacagaggcgaagggaaggtcgcaacaacagttatctccaagatgctattcgttgaacccatcctggaggtttccagcttgccgacaaccaactcaacaaccaattcagccaccaaaataacagctaataccactgatgaacccaccacacaacccaccacagagcccaccacccaacccaccatccaacccacccaaccaactacccagctcccaacagattctcctacccagcccactactgggtccttctgcccaggacctgttactctctgctctgacttggagagtcattcaacagaggccgtgttgggggatgctttggtagatttctccctgaagctctaccacgccttctcagcaatgaagaaggtggagaccaacatggccttttccccattcagcatcgccagcctccttacccaggtcctgctcggggctggggagaacaccaaaacaaacctggagagcatcctctcttaccccaaggacttcacctgtgtccaccaggccctgaagggcttcacgaccaaaggtgtcacctcagtctctcagattttccacagcccagacctggccataagggacacctttgtgaatgcctctcggaccctgtacagcagcagccccagagtcctaagcaacaacagtgacgccaacttggagctcatcaacacctgggtggccaagaacaccaacaacaagatcagccggctgctagacagtctgccctccgatacccgccttgtcctcctcaatgctatctacctgagtgccaagtggaagacaacatttgatcccaagaaaaccagaatggaaccctttcacttcaaaaactcagttataaaagtgcccatgatgaatagcaagaagtaccctgtggcccatttcattgaccaaactttgaaagccaaggtggggcagctgcagctctcccacaatctgagtttggtgatcctggtaccccagaacctgaaacatcgtcttgaagacatggaacaggctctcagcccttctgttttcaaggccatcatggagaaactggagatgtccaagttccagcccactctcctaacactaccccgcatcaaagtgacgaccagccaggatatgctctcaatcatggagaaattggaattcttcgatttttcttatgaccttaacctgtgtgggctgacagaggaccctgatcttcaggtttctgcgatgcagcaccagacagtgctggaactgacagagactggggtggaggcggctgcagcctccgccatctctgtggcccgcaccctgctggtctttgaagtgcagcagcccttcctcttcgtgctctgggaccagcagcacaagttccctgtcttcatggggcgagtatatgaccccagggccgacaaaactcacacatgcccaccgtgcccagcacctgaactcctggggggaccgtcagtcttcctcttccccccaaaacccaaggacaccctcatgatctcccggacccctgaggtcacatgcgtggtggtggacgtgagccacgaagaccctgaggtcaagttcaactggtacgtggacggcgtggaggtgcataatgccaagacaaagccgcgggaggagcagtacaacagcacgtaccgtgtggtcagcgtcctcaccgtcctgcaccaggactggctgaatggcaaggagtacaagtgcaaggtctccaacaaagccctcccagcccccatcgagaaaaccatctccaaagccaaagggcagccccgagaaccacaggtgtacaccctgcccccatcccgggatgagctgaccaagaaccaggtcaatctgacctgcctggtcaaaggcttctatcccagcgacatcgccgtggagtgggagagcaatgggcagccggagaacaactacaagaccacgcctcccgtgctggactccgacggctccttcttcctcaatagcaagctcaccgtggacaagagcaggtggcagcaggggaacgtcttctcatgctccgtgatgcatgaggctctgcacaaccactacacgcagaagagcctctccctgtctccgggttgaagatctagagctgaattcctgcagccagggggatcagcctctactgtgccttctagttgccagccatctgttgtttgcccctcccccttgccttccttgaccctggaaggtgccactcccactgtcctttcctaataaaatgaggaaattgcatcacattgtctgagtaggtgtcattctattctggggggtggggtggggcaggacagcaagggggaggattgggaagacaatagcaggcatgctggggatgcagtgggctctatggcttctgaggcagaaagaaccagctggggctcgagatccactagggccgcaggaacccctagtgatggagttggccactccctctctgcgcgctcgctcgctcactgaggccgggcgaccaaaggtcgcccgacgcccgggctttgcccgggcggcctcagtgagcgagcgagcgcgcag

SEQ ID NO: 51 - DNA, 4030 bp, Artificial Sequence
  pAAV_ApoE_hAAT_HBB2m1_SERPING1.Fc(Ying)_BGH228
ctgcgcgctcgctcgctcactgaggccgcccgggcaaagcccgggcggcctcagtgagcgagcgagcgcgcagagagggagtggccaactccatcactaggggttcctgcggcctagtaggctcagaggcacacaggagtttctgggctcaccctgcccccttccaacccctcagttcccatcctccagcagctgtttgtgtgctgcctctgaagtccacactgaacaaacttcagcctactcatgtccctaaaatgggcaaacattgcaagcagcaaacagcaaacacacagccctccctgcctgctgaccttggagctggggcagaggtcagagacctctctgggcccatgccacctccaacatccactcgaccccttggaatttcggtggagaggagcagaggttgtcctggcgtggtttaggtagtgtgagaggggtacccggggatcttgctaccagtggaacagccactaaggattctgcagtgagagcagagggccagctaagtggtactctcccagagactgtctgactcacgccaccccctccaccttggacacaggacgctgtggtttctgagccaggtacaatgactcctttcggtaagtgcagtggaagctgtacactgcccaggcaaagcgtccgggcagcgtaggcgggcgactcagatcccagccagtggacttagcccctgtttgctcctccgataactggggtgaccttggttaatattcaccagcagcctcccccgttgcccctctggatccactgcttaaatacggacgaggacagggccctgtctcctcagcttcaggcaccaccactgacctgggacagtgaatagatcctgagaacttcagggtgagtctatgggacccttgatgttttctttccccttcttttctatggttaagttcatgtcataggaaggggagaagtaacagggtacacatattgaccaaatcagggtaattttgcatttgtaattttaaaaaatgctttcttcttttaatatacttttttgtttatcttatttctaatactttccctaatctctttctttcagggcaataatgatacaatgtatcatgcctctttgcaccattctaaagaataacagtgataatttctgggttaaggcaatagcaatatttctgcatataaatatttctgcatataaattgtaactgatgtaagaggtttcatattgctaatagcagctacaatccagctaccattctgcttttattttctggttgggataaggctggattattctgagtccaagctaggcccttttgctaatcttgttcatacctcttatcttcctcccacagctcctgggcaacctgctggtctctctgctggcccatcactttggcaaagcacgcgtgccaccatggcctccaggctgaccctgctgaccctcctgctgctgctgctggctggggatagagcctcctcaaatccaaatgctaccagctccagctcccaggatccagagagtttgcaagacagaggcgaagggaaggtcgcaacaacagttatctccaagatgctattcgttgaacccatcctggaggtttccagcttgccgacaaccaactcaacaaccaattcagccaccaaaataacagctaataccactgatgaacccaccacacaacccaccacagagcccaccacccaacccaccatccaacccacccaaccaactacccagctcccaacagattctcctacccagcccactactgggtccttctgcccaggacctgttactctctgctctgacttggagagtcattcaacagaggccgtgttgggggatgctttggtagatttctccctgaagctctaccacgccttctcagcaatgaagaaggtggagaccaacatggccttttccccattcagcatcgccagcctccttacccaggtcctgctcggggctggggagaacaccaaaacaaacctggagagcatcctctcttaccccaaggacttcacctgtgtccaccaggccctgaagggcttcacgaccaaaggtgtcacctcagtctctcagattttccacagcccagacctggccataagggacacctttgtgaatgcctctcggaccctgtacagcagcagccccagagtcctaagcaacaacagtgacgccaacttggagctcatcaacacctgggtggccaagaacaccaacaacaagatcagccggctgctagacagtctgccctccgatacccgccttgtcctcctcaatgctatctacctgagtgccaagtggaagacaacatttgatcccaagaaaaccagaatggaaccctttcacttcaaaaactcagttataaaagtgcccatgatgaatagcaagaagtaccctgtggcccatttcattgaccaaactttgaaagccaaggtggggcagctgcagctctcccacaatctgagtttggtgatcctggtaccccagaacctgaaacatcgtcttgaagacatggaacaggctctcagcccttctgttttcaaggccatcatggagaaactggagatgtccaagttccagcccactctcctaacactaccccgcatcaaagtgacgaccagccaggatatgctctcaatcatggagaaattggaattcttcgatttttcttatgaccttaacctgtgtgggctgacagaggaccctgatcttcaggtttctgcgatgcagcaccagacagtgctggaactgacagagactggggtggaggcggctgcagcctccgccatctctgtggcccgcaccctgctggtctttgaagtgcagcagcccttcctcttcgtgctctgggaccagcagcacaagttccctgtcttcatggggcgagtatatgaccccagggccgacaaaactcacacatgcccaccgtgcccagcacctgaactcctggggggaccgtcagtcttcctcttccccccaaaacccaaggacaccctcatgatctcccggacccctgaggtcacatgcgtggtggtggacgtgagccacgaagaccctgaggtcaagttcaactggtacgtggacggcgtggaggtgcataatgccaagacaaagccgcgggaggagcagtacaacagcacgtaccgtgtggtcagcgtcctcaccgtcctgcaccaggactggctgaatggcaaggagtacaagtgcaaggtctccaacaaagccctcccagcccccatcgagaaaaccatctccaaagccaaagggcagccccgagaaccacaggtgtacaccaagcccccatcccgggatgagctgaccaagaaccaggtcagcctgagctgcctggtcaaaggcttctatcccagcgacatcgccgtggagtgggagagcaatgggcagccggagaacaactacaagaccacggtgcccgtgctggactccgacggctccttcagactcgccagctacctcaccgtggacaagagcaggtggcagcaggggaacgtcttctcatgctccgtgatgcatgaggctctgcacaaccactacacgcagaagagcctctccctgtctccgggttgaagatctagagctgaattcctgcagccagggggatcagcctctactgtgccttctagttgccagccatctgttgtttgcccctcccccttgccttccttgaccctggaaggtgccactcccactgtcctttcctaataaaatgaggaaattgcatcacattgtctgagtaggtgtcattctattctggggggtggggtggggcaggacagcaagggggaggattgggaagacaatagcaggcatgctggggatgcagtgggctctatggcttctgaggcagaaagaaccagctggggctcgagatccactagggccgcaggaacccctagtgatggagttggccactccctctctgcgcgctcgctcgctcactgaggccgggcgaccaaaggtcgcccgacgcccgggctttgcccgggcggcctcagtgagcgagcgagcgcgcag

SEQ ID NO: 52 - DNA, 4030 bp, Artificial Sequence
  pAAV_ApoE_hAAT_HBB2m1_SERPING1.Fc(YTE)_BGH228
ctgcgcgctcgctcgctcactgaggccgcccgggcaaagcccgggcggcctcagtgagcgagcgagcgcgcagagagggagtggccaactccatcactaggggttcctgcggcctagtaggctcagaggcacacaggagtttctgggctcaccctgcccccttccaacccctcagttcccatcctccagcagctgtttgtgtgctgcctctgaagtccacactgaacaaacttcagcctactcatgtccctaaaatgggcaaacattgcaagcagcaaacagcaaacacacagccctccctgcctgctgaccttggagctggggcagaggtcagagacctctctgggcccatgccacctccaacatccactcgaccccttggaatttcggtggagaggagcagaggttgtcctggcgtggtttaggtagtgtgagaggggtacccggggatcttgctaccagtggaacagccactaaggattctgcagtgagagcagagggccagctaagtggtactctcccagagactgtctgactcacgccaccccctccaccttggacacaggacgctgtggtttctgagccaggtacaatgactcctttcggtaagtgcagtggaagctgtacactgcccaggcaaagcgtccgggcagcgtaggcgggcgactcagatcccagccagtggacttagcccctgtttgctcctccgataactggggtgaccttggttaatattcaccagcagcctcccccgttgcccctctggatccactgcttaaatacggacgaggacagggccctgtctcctcagcttcaggcaccaccactgacctgggacagtgaatagatcctgagaacttcagggtgagtctatgggacccttgatgttttctttccccttcttttctatggttaagttcatgtcataggaaggggagaagtaacagggtacacatattgaccaaatcagggtaattttgcatttgtaattttaaaaaatgctttcttcttttaatatacttttttgtttatcttatttctaatactttccctaatctctttctttcagggcaataatgatacaatgtatcatgcctctttgcaccattctaaagaataacagtgataatttctgggttaaggcaatagcaatatttctgcatataaatatttctgcatataaattgtaactgatgtaagaggtttcatattgctaatagcagctacaatccagctaccattctgcttttattttctggttgggataaggctggattattctgagtccaagctaggcccttttgctaatcttgttcatacctcttatcttcctcccacagctcctgggcaacctgctggtctctctgctggcccatcactttggcaaagcacgcgtgccaccatggcctccaggctgaccctgctgaccctcctgctgctgctgctggctggggatagagcctcctcaaatccaaatgctaccagctccagctcccaggatccagagagtttgcaagacagaggcgaagggaaggtcgcaacaacagttatctccaagatgctattcgttgaacccatcctggaggtttccagcttgccgacaaccaactcaacaaccaattcagccaccaaaataacagctaataccactgatgaacccaccacacaacccaccacagagcccaccacccaacccaccatccaacccacccaaccaactacccagctcccaacagattctcctacccagcccactactgggtccttctgcccaggacctgttactctctgctctgacttggagagtcattcaacagaggccgtgttgggggatgctttggtagatttctccctgaagctctaccacgccttctcagcaatgaagaaggtggagaccaacatggccttttccccattcagcatcgccagcctccttacccaggtcctgctcggggctggggagaacaccaaaacaaacctggagagcatcctctcttaccccaaggacttcacctgtgtccaccaggccctgaagggcttcacgaccaaaggtgtcacctcagtctctcagattttccacagcccagacctggccataagggacacctttgtgaatgcctctcggaccctgtacagcagcagccccagagtcctaagcaacaacagtgacgccaacttggagctcatcaacacctgggtggccaagaacaccaacaacaagatcagccggctgctagacagtctgccctccgatacccgccttgtcctcctcaatgctatctacctgagtgccaagtggaagacaacatttgatcccaagaaaaccagaatggaaccctttcacttcaaaaactcagttataaaagtgcccatgatgaatagcaagaagtaccctgtggcccatttcattgaccaaactttgaaagccaaggtggggcagctgcagctctcccacaatctgagtttggtgatcctggtaccccagaacctgaaacatcgtcttgaagacatggaacaggctctcagcccttctgttttcaaggccatcatggagaaactggagatgtccaagttccagcccactctcctaacactaccccgcatcaaagtgacgaccagccaggatatgctctcaatcatggagaaattggaattcttcgatttttcttatgaccttaacctgtgtgggctgacagaggaccctgatcttcaggtttctgcgatgcagcaccagacagtgctggaactgacagagactggggtggaggcggctgcagcctccgccatctctgtggcccgcaccctgctggtctttgaagtgcagcagcccttcctcttcgtgctctgggaccagcagcacaagttccctgtcttcatggggcgagtatatgaccccagggccgacaaaactcacacatgcccaccgtgcccagcacctgaactcctggggggaccgtcagtcttcctcttccccccaaaacccaaggacaccctctacatcacccgggagcctgaggtcacatgcgtggtggtggacgtgagccacgaagaccctgaggtcaagttcaactggtacgtggacggcgtggaggtgcataatgccaagacaaagccgcgggaggagcagtacaacagcacgtaccgtgtggtcagcgtcctcaccgtcctgcaccaggactggctgaatggcaaggagtacaagtgcaaggtctccaacaaagccctcccagcccccatcgagaaaaccatctccaaagccaaagggcagccccgagaaccacaggtgtacaccctgcccccatcccgggatgagctgaccaagaaccaggtcagcctgacctgcctggtcaaaggcttctatcccagcgacatcgccgtggagtgggagagcaatgggcagccggagaacaactacaagaccacgcctcccgtgctggactccgacggctccttcttcctctacagcaagctcaccgtggacaagagcaggtggcagcaggggaacgtcttctcatgctccgtgatgcatgaggctctgcacaaccactacacgcagaagagcctctccctgtctccgggttgaagatctagagctgaattcctgcagccagggggatcagcctctactgtgccttctagttgccagccatctgttgtttgcccctcccccttgccttccttgaccctggaaggtgccactcccactgtcctttcctaataaaatgaggaaattgcatcacattgtctgagtaggtgtcattctattctggggggtggggtggggcaggacagcaagggggaggattgggaagacaatagcaggcatgctggggatgcagtgggctctatggcttctgaggcagaaagaaccagctggggctcgagatccactagggccgcaggaacccctagtgatggagttggccactccctctctgcgcgctcgctcgctcactgaggccgggcgaccaaaggtcgcccgacgcccgggctttgcccgggcggcctcagtgagcgagcgagcgcgcag

SEQ ID NO: 53 - DNA, 4030 bp, Artificial Sequence
  pAAV_ApoE_hAAT_HBB2m1_SERPING1.Fc(LS)_BGH228
ctgcgcgctcgctcgctcactgaggccgcccgggcaaagcccgggcggcctcagtgagcgagcgagcgcgcagagagggagtggccaactccatcactaggggttcctgcggcctagtaggctcagaggcacacaggagtttctgggctcaccctgcccccttccaacccctcagttcccatcctccagcagctgtttgtgtgctgcctctgaagtccacactgaacaaacttcagcctactcatgtccctaaaatgggcaaacattgcaagcagcaaacagcaaacacacagccctccctgcctgctgaccttggagctggggcagaggtcagagacctctctgggcccatgccacctccaacatccactcgaccccttggaatttcggtggagaggagcagaggttgtcctggcgtggtttaggtagtgtgagaggggtacccggggatcttgctaccagtggaacagccactaaggattctgcagtgagagcagagggccagctaagtggtactctcccagagactgtctgactcacgccaccccctccaccttggacacaggacgctgtggtttctgagccaggtacaatgactcctttcggtaagtgcagtggaagctgtacactgcccaggcaaagcgtccgggcagcgtaggcgggcgactcagatcccagccagtggacttagcccctgtttgctcctccgataactggggtgaccttggttaatattcaccagcagcctcccccgttgcccctctggatccactgcttaaatacggacgaggacagggccctgtctcctcagcttcaggcaccaccactgacctgggacagtgaatagatcctgagaacttcagggtgagtctatgggacccttgatgttttctttccccttcttttctatggttaagttcatgtcataggaaggggagaagtaacagggtacacatattgaccaaatcagggtaattttgcatttgtaattttaaaaaatgctttcttcttttaatatacttttttgtttatcttatttctaatactttccctaatctctttctttcagggcaataatgatacaatgtatcatgcctctttgcaccattctaaagaataacagtgataatttctgggttaaggcaatagcaatatttctgcatataaatatttctgcatataaattgtaactgatgtaagaggtttcatattgctaatagcagctacaatccagctaccattctgcttttattttctggttgggataaggctggattattctgagtccaagctaggcccttttgctaatcttgttcatacctcttatcttcctcccacagctcctgggcaacctgctggtctctctgctggcccatcactttggcaaagcacgcgtgccaccatggcctccaggctgaccctgctgaccctcctgctgctgctgctggctggggatagagcctcctcaaatccaaatgctaccagctccagctcccaggatccagagagtttgcaagacagaggcgaagggaaggtcgcaacaacagttatctccaagatgctattcgttgaacccatcctggaggtttccagcttgccgacaaccaactcaacaaccaattcagccaccaaaataacagctaataccactgatgaacccaccacacaacccaccacagagcccaccacccaacccaccatccaacccacccaaccaactacccagctcccaacagattctcctacccagcccactactgggtccttctgcccaggacctgttactctctgctctgacttggagagtcattcaacagaggccgtgttgggggatgctttggtagatttctccctgaagctctaccacgccttctcagcaatgaagaaggtggagaccaacatggccttttccccattcagcatcgccagcctccttacccaggtcctgctcggggctggggagaacaccaaaacaaacctggagagcatcctctcttaccccaaggacttcacctgtgtccaccaggccctgaagggcttcacgaccaaaggtgtcacctcagtctctcagattttccacagcccagacctggccataagggacacctttgtgaatgcctctcggaccctgtacagcagcagccccagagtcctaagcaacaacagtgacgccaacttggagctcatcaacacctgggtggccaagaacaccaacaacaagatcagccggctgctagacagtctgccctccgatacccgccttgtcctcctcaatgctatctacctgagtgccaagtggaagacaacatttgatcccaagaaaaccagaatggaaccctttcacttcaaaaactcagttataaaagtgcccatgatgaatagcaagaagtaccctgtggcccatttcattgaccaaactttgaaagccaaggtggggcagctgcagctctcccacaatctgagtttggtgatcctggtaccccagaacctgaaacatcgtcttgaagacatggaacaggctctcagcccttctgttttcaaggccatcatggagaaactggagatgtccaagttccagcccactctcctaacactaccccgcatcaaagtgacgaccagccaggatatgctctcaatcatggagaaattggaattcttcgatttttcttatgaccttaacctgtgtgggctgacagaggaccctgatcttcaggtttctgcgatgcagcaccagacagtgctggaactgacagagactggggtggaggcggctgcagcctccgccatctctgtggcccgcaccctgctggtctttgaagtgcagcagcccttcctcttcgtgctctgggaccagcagcacaagttccctgtcttcatggggcgagtatatgaccccagggccgacaaaactcacacatgcccaccgtgcccagcacctgaactcctggggggaccgtcagtcttcctcttccccccaaaacccaaggacaccctcatgatctcccggacccctgaggtcacatgcgtggtggtggacgtgagccacgaagaccctgaggtcaagttcaactggtacgtggacggcgtggaggtgcataatgccaagacaaagccgcgggaggagcagtacaacagcacgtaccgtgtggtcagcgtcctcaccgtcctgcaccaggactggctgaatggcaaggagtacaagtgcaaggtctccaacaaagccctcccagcccccatcgagaaaaccatctccaaagccaaagggcagccccgagaaccacaggtgtacaccctgcccccatcccgggatgagctgaccaagaaccaggtcagcctgacctgcctggtcaaaggcttctatcccagcgacatcgccgtggagtgggagagcaatgggcagccggagaacaactacaagaccacgcctcccgtgctggactccgacggctccttcttcctctacagcaagctcaccgtggacaagagcaggtggcagcaggggaacgtcttctcatgctccgtgctgcatgaggctctgcacagccactacacgcagaagagcctctccctgtctccgggttgaagatctagagctgaattcctgcagccagggggatcagcctctactgtgccttctagttgccagccatctgttgtttgcccctcccccttgccttccttgaccctggaaggtgccactcccactgtcctttcctaataaaatgaggaaattgcatcacattgtctgagtaggtgtcattctattctggggggtggggtggggcaggacagcaagggggaggattgggaagacaatagcaggcatgctggggatgcagtgggctctatggcttctgaggcagaaagaaccagctggggctcgagatccactagggccgcaggaacccctagtgatggagttggccactccctctctgcgcgctcgctcgctcactgaggccgggcgaccaaaggtcgcccgacgcccgggctttgcccgggcggcctcagtgagcgagcgagcgcgcag

SEQ ID NO: 54 - DNA, 4030 bp, Artificial Sequence
  pAAV_ApoE_hAAT_HBB2m1_SERPING1.Fc(IFL)_BGH228
ctgcgcgctcgctcgctcactgaggccgcccgggcaaagcccgggcggcctcagtgagcgagcgagcgcgcagagagggagtggccaactccatcactaggggttcctgcggcctagtaggctcagaggcacacaggagtttctgggctcaccctgcccccttccaacccctcagttcccatcctccagcagctgtttgtgtgctgcctctgaagtccacactgaacaaacttcagcctactcatgtccctaaaatgggcaaacattgcaagcagcaaacagcaaacacacagccctccctgcctgctgaccttggagctggggcagaggtcagagacctctctgggcccatgccacctccaacatccactcgaccccttggaatttcggtggagaggagcagaggttgtcctggcgtggtttaggtagtgtgagaggggtacccggggatcttgctaccagtggaacagccactaaggattctgcagtgagagcagagggccagctaagtggtactctcccagagactgtctgactcacgccaccccctccaccttggacacaggacgctgtggtttctgagccaggtacaatgactcctttcggtaagtgcagtggaagctgtacactgcccaggcaaagcgtccgggcagcgtaggcgggcgactcagatcccagccagtggacttagcccctgtttgctcctccgataactggggtgaccttggttaatattcaccagcagcctcccccgttgcccctctggatccactgcttaaatacggacgaggacagggccctgtctcctcagcttcaggcaccaccactgacctgggacagtgaatagatcctgagaacttcagggtgagtctatgggacccttgatgttttctttccccttcttttctatggttaagttcatgtcataggaaggggagaagtaacagggtacacatattgaccaaatcagggtaattttgcatttgtaattttaaaaaatgctttcttcttttaatatacttttttgtttatcttatttctaatactttccctaatctctttctttcagggcaataatgatacaatgtatcatgcctctttgcaccattctaaagaataacagtgataatttctgggttaaggcaatagcaatatttctgcatataaatatttctgcatataaattgtaactgatgtaagaggtttcatattgctaatagcagctacaatccagctaccattctgcttttattttctggttgggataaggctggattattctgagtccaagctaggcccttttgctaatcttgttcatacctcttatcttcctcccacagctcctgggcaacctgctggtctctctgctggcccatcactttggcaaagcacgcgtgccaccatggcctccaggctgaccctgctgaccctcctgctgctgctgctggctggggatagagcctcctcaaatccaaatgctaccagctccagctcccaggatccagagagtttgcaagacagaggcgaagggaaggtcgcaacaacagttatctccaagatgctattcgttgaacccatcctggaggtttccagcttgccgacaaccaactcaacaaccaattcagccaccaaaataacagctaataccactgatgaacccaccacacaacccaccacagagcccaccacccaacccaccatccaacccacccaaccaactacccagctcccaacagattctcctacccagcccactactgggtccttctgcccaggacctgttactctctgctctgacttggagagtcattcaacagaggccgtgttgggggatgctttggtagatttctccctgaagctctaccacgccttctcagcaatgaagaaggtggagaccaacatggccttttccccattcagcatcgccagcctccttacccaggtcctgctcggggctggggagaacaccaaaacaaacctggagagcatcctctcttaccccaaggacttcacctgtgtccaccaggccctgaagggcttcacgaccaaaggtgtcacctcagtctctcagattttccacagcccagacctggccataagggacacctttgtgaatgcctctcggaccctgtacagcagcagccccagagtcctaagcaacaacagtgacgccaacttggagctcatcaacacctgggtggccaagaacaccaacaacaagatcagccggctgctagacagtctgccctccgatacccgccttgtcctcctcaatgctatctacctgagtgccaagtggaagacaacatttgatcccaagaaaaccagaatggaaccctttcacttcaaaaactcagttataaaagtgcccatgatgaatagcaagaagtaccctgtggcccatttcattgaccaaactttgaaagccaaggtggggcagctgcagctctcccacaatctgagtttggtgatcctggtaccccagaacctgaaacatcgtcttgaagacatggaacaggctctcagcccttctgttttcaaggccatcatggagaaactggagatgtccaagttccagcccactctcctaacactaccccgcatcaaagtgacgaccagccaggatatgctctcaatcatggagaaattggaattcttcgatttttcttatgaccttaacctgtgtgggctgacagaggaccctgatcttcaggtttctgcgatgcagcaccagacagtgctggaactgacagagactggggtggaggcggctgcagcctccgccatctctgtggcccgcaccctgctggtctttgaagtgcagcagcccttcctcttcgtgctctgggaccagcagcacaagttccctgtcttcatggggcgagtatatgaccccagggccgacaaaactcacacatgcccaccgtgcccagcacctgaactcctggggggaccgtcagtcttcctcttccccccaaaacccaaggacaccctcatgatctcccggacccctgagatcacatgcgtggtggtggacgtgagccacgaagaccctgaggtcaagttcaactggtacgtggacggcgtggaggtgcataatgccaagacaaagccgcgggaggagcagtacaacagcacgtaccgtgtggtcagcgtcctcaccttcctgcaccaggactggctgaatggcaaggagtacaagtgcaaggtctccaacaaagccctcccagcccccatcgagaaaaccatctccaaagccaaagggcagccccgagaaccacaggtgtacaccctgcccccatcccgggatgagctgaccaagaaccaggtcagcctgacctgcctggtcaaaggcttctatcccagcgacatcgccgtggagtgggagagcaatgggcagccggagaacaactacaagaccacgcctcccgtgctggactccgacggctccttcttcctctacagcaagctcaccgtggacaagagcaggtggcagcaggggaacgtcttctcatgctccgtgctgcatgaggctctgcacaaccactacacgcagaagagcctctccctgtctccgggttgaagatctagagctgaattcctgcagccagggggatcagcctctactgtgccttctagttgccagccatctgttgtttgcccctcccccttgccttccttgaccctggaaggtgccactcccactgtcctttcctaataaaatgaggaaattgcatcacattgtctgagtaggtgtcattctattctggggggtggggtggggcaggacagcaagggggaggattgggaagacaatagcaggcatgctggggatgcagtgggctctatggcttctgaggcagaaagaaccagctggggctcgagatccactagggccgcaggaacccctagtgatggagttggccactccctctctgcgcgctcgctcgctcactgaggccgggcgaccaaaggtcgcccgacgcccgggctttgcccgggcggcctcagtgagcgagcgagcgcgcag

SEQ ID NO: 55 - DNA, 3479 bp, Artificial Sequence
  pSwap_ApoE_hAAT_HBB2m1_SERPING1co21_(4x mir-142-3p)_BGH228
cctgcaggcagctgcgcgctcgctcgctcactgaggccgcccgggcaaagcccgggcggcctcagtgagcgagcgagcgcgcagagagggagtggccaactccatcactaggggttcctgcggcctagtactaggctcagaggcacacaggagtttctgggctcaccctgcccccttccaacccctcagttcccatcctccagcagctgtttgtgtgctgcctctgaagtccacactgaacaaacttcagcctactcatgtccctaaaatgggcaaacattgcaagcagcaaacagcaaacacacagccctccctgcctgctgaccttggagctggggcagaggtcagagacctctctgggcccatgccacctccaacatccactcgaccccttggaatttcggtggagaggagcagaggttgtcctggcgtggtttaggtagtgtgagaggggtacccggggatcttgctaccagtggaacagccactaaggattctgcagtgagagcagagggccagctaagtggtactctcccagagactgtctgactcacgccaccccctccaccttggacacaggacgctgtggtttctgagccaggtacaatgactcctttcggtaagtgcagtggaagctgtacactgcccaggcaaagcgtccgggcagcgtaggcgggcgactcagatcccagccagtggacttagcccctgtttgctcctccgataactggggtgaccttggttaatattcaccagcagcctcccccgttgcccctctggatccactgcttaaatacggacgaggacagggccctgtctcctcagcttcaggcaccaccactgacctgggacagtgaatagatcttgagaacttcagggtgagtctatgggacccttgatgttttctttccccttcttttctatggttaagttcatgtcataggaaggggagaagtaacagggtacacatattgaccaaatcagggtaattttgcatttgtaattttaaaaaatgctttcttcttttaatatacttttttgtttatcttatttctaatactttccctaatctctttctttcagggcaataatgatacaatgtatcatgcctctttgcaccattctaaagaataacagtgataatttctgggttaaggcaatagcaatatttctgcatataaatatttctgcatataaattgtaactgatgtaagaggtttcatattgctaatagcagctacaatccagctaccattctgcttttattttctggttgggataaggctggattattctgagtccaagctaggcccttttgctaatcttgttcatacctcttatcttcctcccacagctcctgggcaacctgctggtctctctgctggcccatcactttggcaaagcactagtgccaccatggcctctaggctgactctgctgactctgctgctcctgctgctggctggggacagggccagctctaaccccaatgctacttctagctcctctcaggaccctgagagcctgcaggacaggggggagggcaaggtggccaccactgtgatctctaagatgctgtttgtggagcccatcctggaggtgagcagcctgcccaccaccaacagcaccaccaactctgccactaagatcactgccaacaccactgatgagcccaccacccagcccactactgagcccaccacccagcctactatccagcccacccagcccactacccagctgcccactgacagccctacccagcccaccactggcagcttctgccctgggcctgtgaccctgtgctctgacctggagagccattctactgaggctgtgctgggggatgccctggtggacttctctctgaagctgtaccatgctttctctgccatgaagaaggtggagactaacatggcttttagccccttcagcattgctagcctgctgacccaggtgctgctgggggctggggagaacactaagaccaacctggaatctatcctgagctaccccaaggacttcacctgtgtgcaccaggccctgaagggcttcaccaccaagggggtgacctctgtgagccagatcttccacagccctgacctggccatcagggatacttttgtgaatgccagcagaaccctgtactcttctagccccagggtgctgagcaataattctgatgctaacctggagctgatcaatacctgggtggctaagaataccaacaacaagattagcaggctgctggactctctgccttctgataccaggctggtgctgctgaatgccatttacctgtctgccaagtggaagaccacttttgaccctaagaagactaggatggagcctttccacttcaagaactctgtcattaaggtgcccatgatgaacagcaagaagtatcctgtggcccactttattgaccagactctgaaggccaaggtgggccagctgcagctgagccataacctgagcctggtgatcctggtgccccagaacctgaagcataggctggaggacatggagcaggctctgagcccctctgtgttcaaggctattatggagaagctggagatgagcaagttccagcccactctgctgaccctgcccagaatcaaggtgaccacctctcaggacatgctgagcatcatggaaaagctggagttctttgacttttcttatgacctgaatctgtgtggcctgactgaggatcctgatctgcaggtgtctgccatgcagcaccagactgtgctggagctgactgagactggggtggaggctgctgctgcttctgccatctctgtggccaggaccctgctggtgtttgaggtgcagcagcccttcctgtttgtgctgtgggaccagcagcacaagtttcctgtgttcatgggcagggtgtatgaccccagagcctgacatctagactccataaagtaggaaacactacaccattccataaagtaggaaacactacaaccagttccataaagtaggaaacactacatcactccataaagtaggaaacactacactctagagctgaattcctgcagccagggggatcagcctctactgtgccttctagttgccagccatctgttgtttgcccctcccccttgccttccttgaccctggaaggtgccactcccactgtcctttcctaataaaatgaggaaattgcatcacattgtctgagtaggtgtcattctattctggggggtggggtggggcaggacagcaagggggaggattgggaagacaatagcaggcatgctggggatgcagtgggctctatggcttctgaggcagaaagaaccagctggggctcgagatccactagggccgcaggaacccctagtgatggagttggccactccctctctgcgcgctcgctcgctcactgaggccgggcgaccaaaggtcgcccgacgcccgggctttgcccgggcggcctcagtgagcgagcgagcgcgcag

SEQ ID NO: 56 - DNA, 3363 bp, Artificial Sequence
  pAAV_ApoE_hAAT_HBB2m1_SERPING1co21_BGH228 (-ORFs)
cctgcaggcagctgcgcgctcgctcgctcactgaggccgcccgggcaaagcccgggcggcctcagtgagcgagcgagcgcgcagagagggagtggccaactccatcactaggggttcctgcggcctagtaggctcagaggcacacaggagtttctgggctcaccctgcccccttccaacccctcagttcccatcctccagcagctgtttgtgtgctgcctctgaagtccacactgaacaaacttcagcctactcatgtccctaaaatgggcaaacattgcaagcagcaaacagcaaacacacagccctccctgcctgctgaccttggagctggggcagaggtcagagacctctctgggcccatgccacctccaacatccactcgaccccttggaatttcggtggagaggagcagaggttgtcctggcgtggtttaggtagtgtgagaggggtacccggggatcttgctaccagtggaacagccactaaggattctgcagtgagagcagagggccagctaagtggtactctcccagagactgtctgactcacgccaccccctccaccttggacacaggacgctgtggtttctgagccaggtacaatgactcctttcggtaagtgcagtggaagctgtacactgcccaggcaaagcgtccgggcagcgtaggcgggcgactcagatcccagccagtggacttagcccctgtttgctcctccgataactggggtgaccttggttaatattcaccagcagcctcccccgttgcccctctggatccactgcttaaatacggacgaggacagggccctgtctcctcagcttcaggcaccaccactgacctgggacagtgaatagatcctgagaacttcagggtgagtctatgggacccttgatgttttctttccccttcttttctatggttaagttcatgtcataggaaggggagaagtaacagggtacacatattgaccaaatcagggtaattttgcatttgtaattttaaaaaatgctttcttcttttaatatacttttttgtttatcttatttctaatactttccctaatctctttctttcagggcaataatgatacaatgtatcatgcctctttgcaccattctaaagaataacagtgataatttctgggttaaggcaatagcaatatttctgcatataaatatttctgcatataaattgtaactgatgtaagaggtttcatattgctaatagcagctacaatccagctaccattctgcttttattttctggttgggataaggctggattattctgagtccaagctaggcccttttgctaatcttgttcatacctcttatcttcctcccacagctcctgggcaacctgctggtctctctgctggcccatcactttggcaaagcacgcgtgccaccatggcctctaggctgactctgctgactctgctgctcctgctgctggctggggacagggccagctctaaccccaatgctacttctagctcctctcaggaccctgagagcctgcaggacaggggggagggcaaggtggccaccactgtgatctctaagatgctgtttgtggagcccatcctggaggtgagcagcctgcccaccaccaacagcaccaccaactctgccactaagatcactgccaacaccactgatgagcccaccacccagcccactactgagcccaccacccagcctactatccagcccacccagcccactacccagctgcccactgacagccctacccagcccaccactggcagcttctgccctgggcctgtgaccctgtgctcagacctggagagccactctactgaggctgtgctgggggatgccctggtggacttctctctgaagctgtatcatgctttctctgccatgaagaaggtggagactaacatggcttttagccccttcagcattgctagcctgctgacccaggtgctgctgggggctggggagaacactaagaccaacctggaatctatcctgagctaccccaaggacttcacctgtgtgcaccaggccctgaagggcttcaccaccaagggggtgacctctgtgagccagatcttccacagccctgacctggccatcagggatacttttgtgaatgccagcagaaccctgtactcttctagccccagggtgctgagcaataattctgatgctaacctggagctgatcaatacctgggtggctaagaataccaacaacaagattagcaggctgctggactctctgccttctgataccaggctggtgctgctgaatgccatttacctgtctgccaagtggaagaccacttttgaccctaagaagactaggatggagcctttccacttcaagaactctgtcattaaggtgcccatgatgaacagcaagaagtatcctgtggcccactttattgaccagactctgaaggccaaggtgggccagctgcagctgagccacaacctgagcctggtgatcctggtgccccagaacctgaagcacaggctggaggacatggagcaggctctgagcccctctgtgttcaaggctattatggagaagctggagatgagcaagttccagcccactctgctgaccctgcccagaatcaaggtgaccacctctcaggacatgctgagcatcatggaaaagctggagttctttgacttttcttatgacctgaatctgtgtggcctgactgaggatcctgatctgcaggtgtctgccatgcagcaccagactgtgctggagctgactgagactggggtggaggctgctgctgcttctgccatctctgtggccaggaccctgctggtgtttgaggtgcagcagcccttcctgtttgtgctgtgggaccagcagcacaagtttcctgtgttcatgggcagggtgtatgaccccagagcctgaagatctagagctgaattcctgcagccagggggatcagcctctactgtgccttctagttgccagccatctgttgtttgcccctcccccttgccttccttgaccctggaaggtgccactcccactgtcctttcctaataaaatgaggaaattgcatcacattgtctgagtaggtgtcattctattctggggggtggggtggggcaggacagcaagggggaggattgggaagacaatagcaggcatgctggggatgcagtgggctctatggcttctgaggcagaaagaaccagctggggctcgagatccactagggccgcaggaacccctagtgatggagttggccactccctctctgcgcgctcgctcgctcactgaggccgggcgaccaaaggtcgcccgacgcccgggctttgcccgggcggcctcagtgagcgagcgagcgcgcag

SEQ ID NO: 57 - DNA, 3400 bp, Artificial Sequence
  pSwap_ApoE_hAAT_SERPING1co21(SERPING1 5'UTR)_BGH228
cctgcaggcagctgcgcgctcgctcgctcactgaggccgcccgggcaaagcccgggcggcctcagtgagcgagcgagcgcgcagagagggagtggccaactccatcactaggggttcctgcggcctagtactaggctcagaggcacacaggagtttctgggctcaccctgcccccttccaacccctcagttcccatcctccagcagctgtttgtgtgctgcctctgaagtccacactgaacaaacttcagcctactcatgtccctaaaatgggcaaacattgcaagcagcaaacagcaaacacacagccctccctgcctgctgaccttggagctggggcagaggtcagagacctctctgggcccatgccacctccaacatccactcgaccccttggaatttcggtggagaggagcagaggttgtcctggcgtggtttaggtagtgtgagaggggtacccggggatcttgctaccagtggaacagccactaaggattctgcagtgagagcagagggccagctaagtggtactctcccagagactgtctgactcacgccaccccctccaccttggacacaggacgctgtggtttctgagccaggtacaatgactcctttcggtaagtgcagtggaagctgtacactgcccaggcaaagcgtccgggcagcgtaggcgggcgactcagatcccagccagtggacttagcccctgtttgctcctccgataactggggtgaccttggttaatattcaccagcagcctcccccgttgcccctctggatccactgcttaaatacggacgaggacagggccctgtctcctcagcttcaggcaccaccactgacctgggacagtgaatagatctagtctgcactggagctgcctggtgaccagaagtttggagtaggtttggtgctgggcaggggtggggagtagggtggaaagcatggagtgaagaggtctagggagggggtctcctcacccccgccttcctgcccgccttgatctcgggggtctctataggcttgcttccacctgggacttctgcctcctcctaccccagcccctcccgcctcaggcctgttgtgctcagccccccaggacctcccctcccccacgcctctggcctcattgtttggttaaagcaggaccccctccccctcccaccacctcccctccgactgaacagatggacagagacccgggcccacggggagaggaagggccagccggtgccgggaaagggaagcggtttggggaaaacaaaacagagggaggagccagggagaaggtggccccaggagggaggaggagggaattcgctaagagggactggggcctgagacggaatgggggcgggccccgggcggggtgggggcccctgggctcccagggtgggagctggctccgaggctggctggctccgcaggtccgctgacgtcgccgcccagatggcctctaggctgactctgctgactctgctgctcctgctgctggctggggacagggccagctctaaccccaatgctacttctagctcctctcaggaccctgagagcctgcaggacaggggggagggcaaggtggccaccactgtgatctctaagatgctgtttgtggagcccatcctggaggtgagcagcctgcccaccaccaacagcaccaccaactctgccactaagatcactgccaacaccactgatgagcccaccacccagcccactactgagcccaccacccagcctactatccagcccacccagcccactacccagctgcccactgacagccctacccagcccaccactggcagcttctgccctgggcctgtgaccctgtgctctgacctggagagccattctactgaggctgtgctgggggatgccctggtggacttctctctgaagctgtaccatgctttctctgccatgaagaaggtggagactaacatggcttttagccccttcagcattgctagcctgctgacccaggtgctgctgggggctggggagaacactaagaccaacctggaatctatcctgagctaccccaaggacttcacctgtgtgcaccaggccctgaagggcttcaccaccaagggggtgacctctgtgagccagatcttccacagccctgacctggccatcagggatacttttgtgaatgccagcagaaccctgtactcttctagccccagggtgctgagcaataattctgatgctaacctggagctgatcaatacctgggtggctaagaataccaacaacaagattagcaggctgctggactctctgccttctgataccaggctggtgctgctgaatgccatttacctgtctgccaagtggaagaccacttttgaccctaagaagactaggatggagcctttccacttcaagaactctgtcattaaggtgcccatgatgaacagcaagaagtatcctgtggcccactttattgaccagactctgaaggccaaggtgggccagctgcagctgagccataacctgagcctggtgatcctggtgccccagaacctgaagcataggctggaggacatggagcaggctctgagcccctctgtgttcaaggctattatggagaagctggagatgagcaagttccagcccactctgctgaccctgcccagaatcaaggtgaccacctctcaggacatgctgagcatcatggaaaagctggagttctttgacttttcttatgacctgaatctgtgtggcctgactgaggatcctgatctgcaggtgtctgccatgcagcaccagactgtgctggagctgactgagactggggtggaggctgctgctgcttctgccatctctgtggccaggaccctgctggtgtttgaggtgcagcagcccttcctgtttgtgctgtgggaccagcagcacaagtttcctgtgttcatgggcagggtgtatgaccccagagcctgacatctagagctgaattcctgcagccagggggatcagcctctactgtgccttctagttgccagccatctgttgtttgcccctcccccttgccttccttgaccctggaaggtgccactcccactgtcctttcctaataaaatgaggaaattgcatcacattgtctgagtaggtgtcattctattctggggggtggggtggggcaggacagcaagggggaggattgggaagacaatagcaggcatgctggggatgcagtgggctctatggcttctgaggcagaaagaaccagctggggctcgagatccactagggccgcaggaacccctagtgatggagttggccactccctctctgcgcgctcgctcgctcactgaggccgggcgaccaaaggtcgcccgacgcccgggctttgcccgggcggcctcagtgagcgagcgagcgcgcag

SEQ ID NO: 58 - DNA, 4324 bp, Artificial Sequence
  pSwap_ApoE_hAAT_HBB2m1_SERPING1co21(Intron 2-3)_BGH228 - SINES_LINES
cctgcaggcagctgcgcgctcgctcgctcactgaggccgcccgggcaaagcccgggcggcctcagtgagcgagcgagcgcgcagagagggagtggccaactccatcactaggggttcctgcggcctagtactaggctcagaggcacacaggagtttctgggctcaccctgcccccttccaacccctcagttcccatcctccagcagctgtttgtgtgctgcctctgaagtccacactgaacaaacttcagcctactcatgtccctaaaatgggcaaacattgcaagcagcaaacagcaaacacacagccctccctgcctgctgaccttggagctggggcagaggtcagagacctctctgggcccatgccacctccaacatccactcgaccccttggaatttcggtggagaggagcagaggttgtcctggcgtggtttaggtagtgtgagaggggtacccggggatcttgctaccagtggaacagccactaaggattctgcagtgagagcagagggccagctaagtggtactctcccagagactgtctgactcacgccaccccctccaccttggacacaggacgctgtggtttctgagccaggtacaatgactcctttcggtaagtgcagtggaagctgtacactgcccaggcaaagcgtccgggcagcgtaggcgggcgactcagatcccagccagtggacttagcccctgtttgctcctccgataactggggtgaccttggttaatattcaccagcagcctcccccgttgcccctctggatccactgcttaaatacggacgaggacagggccctgtctcctcagcttcaggcaccaccactgacctgggacagtgaatagatcttgagaacttcagggtgagtctatgggacccttgatgttttctttccccttcttttctatggttaagttcatgtcataggaaggggagaagtaacagggtacacatattgaccaaatcagggtaattttgcatttgtaattttaaaaaatgctttcttcttttaatatacttttttgtttatcttatttctaatactttccctaatctctttctttcagggcaataatgatacaatgtatcatgcctctttgcaccattctaaagaataacagtgataatttctgggttaaggcaatagcaatatttctgcatataaatatttctgcatataaattgtaactgatgtaagaggtttcatattgctaatagcagctacaatccagctaccattctgcttttattttctggttgggataaggctggattattctgagtccaagctaggcccttttgctaatcttgttcatacctcttatcttcctcccacagctcctgggcaacctgctggtctctctgctggcccatcactttggcaaagcactagtgccaccatggcctctaggctgactctgctgactctgctgctcctgctgctggctggggtatgtggtcccttgtgggatgggggacgggggtggagacgggaggcgggatggtgcggggtgcgggcggtggctgaggattaacccttcaggctccggggaatgaggagagctcctcttgggatcattgagtgtgatccttgcacacgcactcgtagatgtatcaaagcaagagtttgttgtagaaaagagctgtggggaggagaggtttggctgctgtgacacagacggtggtcccaggctagggcctgtgaagacagggaagaatggtagcaaacatacgtgggtctgggtgggggtcaatagcagtgagaggtcccagtggtctgggaggtcatggactagaaataaggctaagaagtgcaggatcccaggagaaaggtaggtaggggtgtgtgtatgtgcgtgtgtgtgtgtgtgcacgcgcaagttggtatcacatactcagcgtgcctatactacttctctctccctcccttcctgcctcccttctttcctccttccctttcttcgttcccttcctaatgtgtactgttttttactgttctaaatcaaggagcacaagttcaaatgtctgtactagccaagcaagtgagtcaaacaggtagatatttacaggaaattgcaagaacatagataaatgacaacactcagcttcactgtttggaaaacaacttcctacagggcagtaattggtcagagattacagagtccctgactatccctcatcttctgcagagcacattcctgtgcacccccaccctcaccctgtattgccccttctctgaggaattagtggtggtggttctaagacagattgctcatctgccgcactgtcagaaattactctcttgtacaggacattttccacatccacaccttctcttcctgctttgagtattttagaggactgtgcctcgtagtaagaaaaaaatgaaactcagtttcttgaaccacaggacagggccagctctaaccccaatgctacttctagctcctctcaggaccctgagagcctgcaggacaggggggagggcaaggtggccaccactgtgatctctaagatgctgtttgtggagcccatcctggaggtgagcagcctgcccaccaccaacagcaccaccaactctgccactaagatcactgccaacaccactgatgagcccaccacccagcccactactgagcccaccacccagcctactatccagcccacccagcccactacccagctgcccactgacagccctacccagcccaccactggcagcttctgccctgggcctgtgaccctgtgctctgacctggagagccattctactgaggctgtgctgggggatgccctggtggacttctctctgaagctgtaccatgctttctctgccatgaagaaggtggagactaacatggcttttagccccttcagcattgctagcctgctgacccaggtgctgctgggggctggggagaacactaagaccaacctggaatctatcctgagctaccccaaggacttcacctgtgtgcaccaggccctgaagggcttcaccaccaagggggtgacctctgtgagccagatcttccacagccctgacctggccatcagggatacttttgtgaatgccagcagaaccctgtactcttctagccccagggtgctgagcaataattctgatgctaacctggagctgatcaatacctgggtggctaagaataccaacaacaagattagcaggctgctggactctctgccttctgataccaggctggtgctgctgaatgccatttacctgtctgccaagtggaagaccacttttgaccctaagaagactaggatggagcctttccacttcaagaactctgtcattaaggtgcccatgatgaacagcaagaagtatcctgtggcccactttattgaccagactctgaaggccaaggtgggccagctgcagctgagccataacctgagcctggtgatcctggtgccccagaacctgaagcataggctggaggacatggagcaggctctgagcccctctgtgttcaaggctattatggagaagctggagatgagcaagttccagcccactctgctgaccctgcccagaatcaaggtgaccacctctcaggacatgctgagcatcatggaaaagctggagttctttgacttttcttatgacctgaatctgtgtggcctgactgaggatcctgatctgcaggtgtctgccatgcagcaccagactgtgctggagctgactgagactggggtggaggctgctgctgcttctgccatctctgtggccaggaccctgctggtgtttgaggtgcagcagcccttcctgtttgtgctgtgggaccagcagcacaagtttcctgtgttcatgggcagggtgtatgaccccagagcctgacatctagagctgaattcctgcagccagggggatcagcctctactgtgccttctagttgccagccatctgttgtttgcccctcccccttgccttccttgaccctggaaggtgccactcccactgtcctttcctaataaaatgaggaaattgcatcacattgtctgagtaggtgtcattctattctggggggtggggtggggcaggacagcaagggggaggattgggaagacaatagcaggcatgctggggatgcagtgggctctatggcttctgaggcagaaagaaccagctggggctcgagatccactagggccgcaggaacccctagtgatggagttggccactccctctctgcgcgctcgctcgctcactgaggccgggcgaccaaaggtcgcccgacgcccgggctttgcccgggcggcctcagtgagcgagcgagcgcgcag

SEQ ID NO: 59 - DNA, 4020 bp, Artificial Sequence
  pSwap_ApoE_hAAT_HBB2m1_SERPING1co21(Intron 3-4)_BGH228 - SINES_LINES
cctgcaggcagctgcgcgctcgctcgctcactgaggccgcccgggcaaagcccgggcggcctcagtgagcgagcgagcgcgcagagagggagtggccaactccatcactaggggttcctgcggcctagtactaggctcagaggcacacaggagtttctgggctcaccctgcccccttccaacccctcagttcccatcctccagcagctgtttgtgtgctgcctctgaagtccacactgaacaaacttcagcctactcatgtccctaaaatgggcaaacattgcaagcagcaaacagcaaacacacagccctccctgcctgctgaccttggagctggggcagaggtcagagacctctctgggcccatgccacctccaacatccactcgaccccttggaatttcggtggagaggagcagaggttgtcctggcgtggtttaggtagtgtgagaggggtacccggggatcttgctaccagtggaacagccactaaggattctgcagtgagagcagagggccagctaagtggtactctcccagagactgtctgactcacgccaccccctccaccttggacacaggacgctgtggtttctgagccaggtacaatgactcctttcggtaagtgcagtggaagctgtacactgcccaggcaaagcgtccgggcagcgtaggcgggcgactcagatcccagccagtggacttagcccctgtttgctcctccgataactggggtgaccttggttaatattcaccagcagcctcccccgttgcccctctggatccactgcttaaatacggacgaggacagggccctgtctcctcagcttcaggcaccaccactgacctgggacagtgaatagatcttgagaacttcagggtgagtctatgggacccttgatgttttctttccccttcttttctatggttaagttcatgtcataggaaggggagaagtaacagggtacacatattgaccaaatcagggtaattttgcatttgtaattttaaaaaatgctttcttcttttaatatacttttttgtttatcttatttctaatactttccctaatctctttctttcagggcaataatgatacaatgtatcatgcctctttgcaccattctaaagaataacagtgataatttctgggttaaggcaatagcaatatttctgcatataaatatttctgcatataaattgtaactgatgtaagaggtttcatattgctaatagcagctacaatccagctaccattctgcttttattttctggttgggataaggctggattattctgagtccaagctaggcccttttgctaatcttgttcatacctcttatcttcctcccacagctcctgggcaacctgctggtctctctgctggcccatcactttggcaaagcactagtgccaccatggcctctaggctgactctgctgactctgctgctcctgctgctggctggggacagggccagctctaaccccaatgctacttctagctcctctcaggaccctgagagcctgcaggacaggggggagggcaaggtggccaccactgtgatctctaagatgctgtttgtggagcccatcctggaggtgagcagcctgcccaccaccaacagcaccaccaactctgccactaagatcactgccaacaccactgatgagcccaccacccagcccactactgagcccaccacccagcctactatccagcccacccagcccactacccagctgcccactgacagccctacccagcccaccactggcagcttctgccctgggcctgtgaccctgtgctctgacctggagagccattctactgaggctgtgctgggggatgccctggtggacttctctctgaagctgtaccatgctttctctgccatgaagaaggtggagactaacatggcttttagccccttcagcattgctagcctgctgacccaggtgctgctgggtaagaccctgcttgaattctctccaggtcatttgttggacactcccataagagtcaccaatccagacacttacaaagccatgcctctgggaagaagctgtaaaaatgggctattatatattgggggtggggtagagggatgtatcttttcattcttgaacattccatcatttcacagtgatgtaataggcacgattgcttgtaaaactctgtgactatacaagaacatataaaataaggtcgcagccactaaccatgtttcatggcaaggagaggtgataagaaagatgaaattattatcagaagaagcagaaagccagcagcctagtgtctgacttagtgggaggtcaaaaaaatgtaaatcctctgccatcttgagggattactgtcaagtcccatttggtaattaccctaggaatggcacaaacaaattactacaagcagtggggacagagctattactccccagagagaattctaaaaaggctacagaatctttcttgagagattgagagaacacttccagctcagatgatctgtgatcccctccaaagcagggaataccctccattccagcctggtccccaaccctcattcccaaggaaggcccccgactcatcctgcaagtatctttcatctctgccctttgttgcaggggctggggagaacactaagaccaacctggaatctatcctgagctaccccaaggacttcacctgtgtgcaccaggccctgaagggcttcaccaccaagggggtgacctctgtgagccagatcttccacagccctgacctggccatcagggatacttttgtgaatgccagcagaaccctgtactcttctagccccagggtgctgagcaataattctgatgctaacctggagctgatcaatacctgggtggctaagaataccaacaacaagattagcaggctgctggactctctgccttctgataccaggctggtgctgctgaatgccatttacctgtctgccaagtggaagaccacttttgaccctaagaagactaggatggagcctttccacttcaagaactctgtcattaaggtgcccatgatgaacagcaagaagtatcctgtggcccactttattgaccagactctgaaggccaaggtgggccagctgcagctgagccataacctgagcctggtgatcctggtgccccagaacctgaagcataggctggaggacatggagcaggctctgagcccctctgtgttcaaggctattatggagaagctggagatgagcaagttccagcccactctgctgaccctgcccagaatcaaggtgaccacctctcaggacatgctgagcatcatggaaaagctggagttctttgacttttcttatgacctgaatctgtgtggcctgactgaggatcctgatctgcaggtgtctgccatgcagcaccagactgtgctggagctgactgagactggggtggaggctgctgctgcttctgccatctctgtggccaggaccctgctggtgtttgaggtgcagcagcccttcctgtttgtgctgtgggaccagcagcacaagtttcctgtgttcatgggcagggtgtatgaccccagagcctgacatctagagctgaattcctgcagccagggggatcagcctctactgtgccttctagttgccagccatctgttgtttgcccctcccccttgccttccttgaccctggaaggtgccactcccactgtcctttcctaataaaatgaggaaattgcatcacattgtctgagtaggtgtcattctattctggggggtggggtggggcaggacagcaagggggaggattgggaagacaatagcaggcatgctggggatgcagtgggctctatggcttctgaggcagaaagaaccagctggggctcgagatccactagggccgcaggaacccctagtgatggagttggccactccctctctgcgcgctcgctcgctcactgaggccgggcgaccaaaggtcgcccgacgcccgggctttgcccgggcggcctcagtgagcgagcgagcgcgcag

SEQ ID NO: 60 - DNA, 3770 bp, Artificial Sequence
  pSwap_ApoE_hAAT_SERPING1co21(SERPING1APRE/ 5'UTR)_BGH228
cctgcaggcagctgcgcgctcgctcgctcactgaggccgcccgggcaaagcccgggcggcctcagtgagcgagcgagcgcgcagagagggagtggccaactccatcactaggggttcctgcggcctagtactaggctcagaggcacacaggagtttctgggctcaccctgcccccttccaacccctcagttcccatcctccagcagctgtttgtgtgctgcctctgaagtccacactgaacaaacttcagcctactcatgtccctaaaatgggcaaacattgcaagcagcaaacagcaaacacacagccctccctgcctgctgaccttggagctggggcagaggtcagagacctctctgggcccatgccacctccaacatccactcgaccccttggaatttcggtggagaggagcagaggttgtcctggcgtggtttaggtagtgtgagaggggtacccggggatcttgctaccagtggaacagccactaaggattctgcagtgagagcagagggccagctaagtggtactctcccagagactgtctgactcacgccaccccctccaccttggacacaggacgctgtggtttctgagccaggtacaatgactcctttcggtaagtgcagtggaagctgtacactgcccaggcaaagcgtccgggcagcgtaggcgggcgactcagatcccagccagtggacttagcccctgtttgctcctccgataactggggtgaccttggttaatattcaccagcagcctcccccgttgcccctctggatccactgcttaaatacggacgaggacagggccctgtctcctcagcttcaggcaccaccactgacctgggacagtgaatagatcttgaggaataacggaggtgagcaatttccaaaaagttcattcctttaaaaactgcggagcacattttgtgtacatgctgtttttattgttactcatgaagacgcgggggaagctttggttgtgtaaagctgagaactgcacccaagcttccccgttcaccccacctaccaggggatttgggctaaattcctggcctggcccacaaagaagaccaagcggtcagtcccattccgtcccatcctgatttacaggaactcacaccagcgatcaatcttccttaatttgtaactgggcagtgtcccgggccagccaatagctaagactgccccccccgcaccccaccctccctgaccctgggggactctctactcagtctgcactggagctgcctggtgaccagaagtttggagtaggtttggtgctgggcaggggtggggagtagggtggaaagcatggagtgaagaggtctagggagggggtctcctcacccccgccttcctgcccgccttgatctcgggggtctctataggcttgcttccacctgggacttctgcctcctcctaccccagcccctcccgcctcaggcctgttgtgctcagccccccaggacctcccctcccccacgcctctggcctcattgtttggttaaagcaggaccccctccccctcccaccacctcccctccgactgaacagatggacagagacccgggcccacggggagaggaagggccagccggtgccgggaaagggaagcggtttggggaaaacaaaacagagggaggagccagggagaaggtggccccaggagggaggaggagggaattcgctaagagggactggggcctgagacggaatgggggcgggccccgggcggggtgggggcccctgggctcccagggtgggagctggctccgaggctggctggctccgcaggtccgctgacgtcgccgcccagatggcctctaggctgactctgctgactctgctgctcctgctgctggctggggacagggccagctctaaccccaatgctacttctagctcctctcaggaccctgagagcctgcaggacaggggggagggcaaggtggccaccactgtgatctctaagatgctgtttgtggagcccatcctggaggtgagcagcctgcccaccaccaacagcaccaccaactctgccactaagatcactgccaacaccactgatgagcccaccacccagcccactactgagcccaccacccagcctactatccagcccacccagcccactacccagctgcccactgacagccctacccagcccaccactggcagcttctgccctgggcctgtgaccctgtgctctgacctggagagccattctactgaggctgtgctgggggatgccctggtggacttctctctgaagctgtaccatgctttctctgccatgaagaaggtggagactaacatggcttttagccccttcagcattgctagcctgctgacccaggtgctgctgggggctggggagaacactaagaccaacctggaatctatcctgagctaccccaaggacttcacctgtgtgcaccaggccctgaagggcttcaccaccaagggggtgacctctgtgagccagatcttccacagccctgacctggccatcagggatacttttgtgaatgccagcagaaccctgtactcttctagccccagggtgctgagcaataattctgatgctaacctggagctgatcaatacctgggtggctaagaataccaacaacaagattagcaggctgctggactctctgccttctgataccaggctggtgctgctgaatgccatttacctgtctgccaagtggaagaccacttttgaccctaagaagactaggatggagcctttccacttcaagaactctgtcattaaggtgcccatgatgaacagcaagaagtatcctgtggcccactttattgaccagactctgaaggccaaggtgggccagctgcagctgagccataacctgagcctggtgatcctggtgccccagaacctgaagcataggctggaggacatggagcaggctctgagcccctctgtgttcaaggctattatggagaagctggagatgagcaagttccagcccactctgctgaccctgcccagaatcaaggtgaccacctctcaggacatgctgagcatcatggaaaagctggagttctttgacttttcttatgacctgaatctgtgtggcctgactgaggatcctgatctgcaggtgtctgccatgcagcaccagactgtgctggagctgactgagactggggtggaggctgctgctgcttctgccatctctgtggccaggaccctgctggtgtttgaggtgcagcagcccttcctgtttgtgctgtgggaccagcagcacaagtttcctgtgttcatgggcagggtgtatgaccccagagcctgacatctagagctgaattcctgcagccagggggatcagcctctactgtgccttctagttgccagccatctgttgtttgcccctcccccttgccttccttgaccctggaaggtgccactcccactgtcctttcctaataaaatgaggaaattgcatcacattgtctgagtaggtgtcattctattctggggggtggggtggggcaggacagcaagggggaggattgggaagacaatagcaggcatgctggggatgcagtgggctctatggcttctgaggcagaaagaaccagctggggctcgagatccactagggccgcaggaacccctagtgatggagttggccactccctctctgcgcgctcgctcgctcactgaggccgggcgaccaaaggtcgcccgacgcccgggctttgcccgggcggcctcagtgagcgagcgagcgcgcag

SEQ ID NO: 61 - DNA, 3735 bp, Artificial Sequence
  pSwap_ApoE_hAAT_(SERPING1 APRE) HBB2m1_SERPING1co21_BGH228
cctgcaggcagctgcgcgctcgctcgctcactgaggccgcccgggcaaagcccgggcggcctcagtgagcgagcgagcgcgcagagagggagtggccaactccatcactaggggttcctgcggcctagtactaggctcagaggcacacaggagtttctgggctcaccctgcccccttccaacccctcagttcccatcctccagcagctgtttgtgtgctgcctctgaagtccacactgaacaaacttcagcctactcatgtccctaaaatgggcaaacattgcaagcagcaaacagcaaacacacagccctccctgcctgctgaccttggagctggggcagaggtcagagacctctctgggcccatgccacctccaacatccactcgaccccttggaatttcggtggagaggagcagaggttgtcctggcgtggtttaggtagtgtgagaggggtacccggggatcttgctaccagtggaacagccactaaggattctgcagtgagagcagagggccagctaagtggtactctcccagagactgtctgactcacgccaccccctccaccttggacacaggacgctgtggtttctgagccaggtacaatgactcctttcggtaagtgcagtggaagctgtacactgcccaggcaaagcgtccgggcagcgtaggcgggcgactcagatcccagccagtggacttagcccctgtttgctcctccgataactggggtgaccttggttaatattcaccagcagcctcccccgttgcccctctggatccactgcttaaatacggacgaggacagggccctgtctcctcagcttcaggcaccaccactgacctgggacagtgaatagatcttgaggaataacggaggtgagcaatttccaaaaagttcattcctttaaaaactgcggagcacattttgtgtacatgctgtttttattgttactcatgaagacgcgggggaagctttggttgtgtaaagctgagaactgcacccaagcttccccgttcaccccacctaccaggggatttgggctaaattcctggcctggcccacaaagaagaccaagcggtcagtcccattccgtcccatcctgatttacaggaactcacaccagcgatcaatcttccttaatttgtaactgggcagtgtcccgggccagccaatagctaagactgccccccccgcaccccaccctccctgaccctgggggactctctactctgagaacttcagggtgagtctatgggacccttgatgttttctttccccttcttttctatggttaagttcatgtcataggaaggggagaagtaacagggtacacatattgaccaaatcagggtaattttgcatttgtaattttaaaaaatgctttcttcttttaatatacttttttgtttatcttatttctaatactttccctaatctctttctttcagggcaataatgatacaatgtatcatgcctctttgcaccattctaaagaataacagtgataatttctgggttaaggcaatagcaatatttctgcatataaatatttctgcatataaattgtaactgatgtaagaggtttcatattgctaatagcagctacaatccagctaccattctgcttttattttctggttgggataaggctggattattctgagtccaagctaggcccttttgctaatcttgttcatacctcttatcttcctcccacagctcctgggcaacctgctggtctctctgctggcccatcactttggcaaagcactagtgccaccatggcctctaggctgactctgctgactctgctgctcctgctgctggctggggacagggccagctctaaccccaatgctacttctagctcctctcaggaccctgagagcctgcaggacaggggggagggcaaggtggccaccactgtgatctctaagatgctgtttgtggagcccatcctggaggtgagcagcctgcccaccaccaacagcaccaccaactctgccactaagatcactgccaacaccactgatgagcccaccacccagcccactactgagcccaccacccagcctactatccagcccacccagcccactacccagctgcccactgacagccctacccagcccaccactggcagcttctgccctgggcctgtgaccctgtgctctgacctggagagccattctactgaggctgtgctgggggatgccctggtggacttctctctgaagctgtaccatgctttctctgccatgaagaaggtggagactaacatggcttttagccccttcagcattgctagcctgctgacccaggtgctgctgggggctggggagaacactaagaccaacctggaatctatcctgagctaccccaaggacttcacctgtgtgcaccaggccctgaagggcttcaccaccaagggggtgacctctgtgagccagatcttccacagccctgacctggccatcagggatacttttgtgaatgccagcagaaccctgtactcttctagccccagggtgctgagcaataattctgatgctaacctggagctgatcaatacctgggtggctaagaataccaacaacaagattagcaggctgctggactctctgccttctgataccaggctggtgctgctgaatgccatttacctgtctgccaagtggaagaccacttttgaccctaagaagactaggatggagcctttccacttcaagaactctgtcattaaggtgcccatgatgaacagcaagaagtatcctgtggcccactttattgaccagactctgaaggccaaggtgggccagctgcagctgagccataacctgagcctggtgatcctggtgccccagaacctgaagcataggctggaggacatggagcaggctctgagcccctctgtgttcaaggctattatggagaagctggagatgagcaagttccagcccactctgctgaccctgcccagaatcaaggtgaccacctctcaggacatgctgagcatcatggaaaagctggagttctttgacttttcttatgacctgaatctgtgtggcctgactgaggatcctgatctgcaggtgtctgccatgcagcaccagactgtgctggagctgactgagactggggtggaggctgctgctgcttctgccatctctgtggccaggaccctgctggtgtttgaggtgcagcagcccttcctgtttgtgctgtgggaccagcagcacaagtttcctgtgttcatgggcagggtgtatgaccccagagcctgacatctagagctgaattcctgcagccagggggatcagcctctactgtgccttctagttgccagccatctgttgtttgcccctcccccttgccttccttgaccctggaaggtgccactcccactgtcctttcctaataaaatgaggaaattgcatcacattgtctgagtaggtgtcattctattctggggggtggggtggggcaggacagcaagggggaggattgggaagacaatagcaggcatgctggggatgcagtgggctctatggcttctgaggcagaaagaaccagctggggctcgagatccactagggccgcaggaacccctagtgatggagttggccactccctctctgcgcgctcgctcgctcactgaggccgggcgaccaaaggtcgcccgacgcccgggctttgcccgggcggcctcagtgagcgagcgagcgcgcag

SEQ ID NO: 62 - DNA, 3397 bp, Artificial Sequence
  pSwap_ApoE_hAAT_HBB2m1_SERPING1co21_BGH228 (SAA2 5'UTR)
cctgcaggcagctgcgcgctcgctcgctcactgaggccgcccgggcaaagcccgggcggcctcagtgagcgagcgagcgcgcagagagggagtggccaactccatcactaggggttcctgcggcctagtactaggctcagaggcacacaggagtttctgggctcaccctgcccccttccaacccctcagttcccatcctccagcagctgtttgtgtgctgcctctgaagtccacactgaacaaacttcagcctactcatgtccctaaaatgggcaaacattgcaagcagcaaacagcaaacacacagccctccctgcctgctgaccttggagctggggcagaggtcagagacctctctgggcccatgccacctccaacatccactcgaccccttggaatttcggtggagaggagcagaggttgtcctggcgtggtttaggtagtgtgagaggggtacccggggatcttgctaccagtggaacagccactaaggattctgcagtgagagcagagggccagctaagtggtactctcccagagactgtctgactcacgccaccccctccaccttggacacaggacgctgtggtttctgagccaggtacaatgactcctttcggtaagtgcagtggaagctgtacactgcccaggcaaagcgtccgggcagcgtaggcgggcgactcagatcccagccagtggacttagcccctgtttgctcctccgataactggggtgaccttggttaatattcaccagcagcctcccccgttgcccctctggatccactgcttaaatacggacgaggacagggccctgtctcctcagcttcaggcaccaccactgacctgggacagtgaatagatcttgagaacttcagggtgagtctatgggacccttgatgttttctttccccttcttttctatggttaagttcatgtcataggaaggggagaagtaacagggtacacatattgaccaaatcagggtaattttgcatttgtaattttaaaaaatgctttcttcttttaatatacttttttgtttatcttatttctaatactttccctaatctctttctttcagggcaataatgatacaatgtatcatgcctctttgcaccattctaaagaataacagtgataatttctgggttaaggcaatagcaatatttctgcatataaatatttctgcatataaattgtaactgatgtaagaggtttcatattgctaatagcagctacaatccagctaccattctgcttttattttctggttgggataaggctggattattctgagtccaagctaggcccttttgctaatcttgttcatacctcttatcttcctcccacagctcctgggcaacctgctggtctctctgctggcccatcactttggcaaagcactagtagggacccgcagctcagctacagcacagatcagccaccatggcctctaggctgactctgctgactctgctgctcctgctgctggctggggacagggccagctctaaccccaatgctacttctagctcctctcaggaccctgagagcctgcaggacaggggggagggcaaggtggccaccactgtgatctctaagatgctgtttgtggagcccatcctggaggtgagcagcctgcccaccaccaacagcaccaccaactctgccactaagatcactgccaacaccactgatgagcccaccacccagcccactactgagcccaccacccagcctactatccagcccacccagcccactacccagctgcccactgacagccctacccagcccaccactggcagcttctgccctgggcctgtgaccctgtgctctgacctggagagccattctactgaggctgtgctgggggatgccctggtggacttctctctgaagctgtaccatgctttctctgccatgaagaaggtggagactaacatggcttttagccccttcagcattgctagcctgctgacccaggtgctgctgggggctggggagaacactaagaccaacctggaatctatcctgagctaccccaaggacttcacctgtgtgcaccaggccctgaagggcttcaccaccaagggggtgacctctgtgagccagatcttccacagccctgacctggccatcagggatacttttgtgaatgccagcagaaccctgtactcttctagccccagggtgctgagcaataattctgatgctaacctggagctgatcaatacctgggtggctaagaataccaacaacaagattagcaggctgctggactctctgccttctgataccaggctggtgctgctgaatgccatttacctgtctgccaagtggaagaccacttttgaccctaagaagactaggatggagcctttccacttcaagaactctgtcattaaggtgcccatgatgaacagcaagaagtatcctgtggcccactttattgaccagactctgaaggccaaggtgggccagctgcagctgagccataacctgagcctggtgatcctggtgccccagaacctgaagcataggctggaggacatggagcaggctctgagcccctctgtgttcaaggctattatggagaagctggagatgagcaagttccagcccactctgctgaccctgcccagaatcaaggtgaccacctctcaggacatgctgagcatcatggaaaagctggagttctttgacttttcttatgacctgaatctgtgtggcctgactgaggatcctgatctgcaggtgtctgccatgcagcaccagactgtgctggagctgactgagactggggtggaggctgctgctgcttctgccatctctgtggccaggaccctgctggtgtttgaggtgcagcagcccttcctgtttgtgctgtgggaccagcagcacaagtttcctgtgttcatgggcagggtgtatgaccccagagcctgacatctagagctgaattcctgcagccagggggatcagcctctactgtgccttctagttgccagccatctgttgtttgcccctcccccttgccttccttgaccctggaaggtgccactcccactgtcctttcctaataaaatgaggaaattgcatcacattgtctgagtaggtgtcattctattctggggggtggggtggggcaggacagcaagggggaggattgggaagacaatagcaggcatgctggggatgcagtgggctctatggcttctgaggcagaaagaaccagctggggctcgagatccactagggccgcaggaacccctagtgatggagttggccactccctctctgcgcgctcgctcgctcactgaggccgggcgaccaaaggtcgcccgacgcccgggctttgcccgggcggcctcagtgagcgagcgagcgcgcag

SEQ ID NO: 63 - DNA, 3508 bp, Artificial Sequence
  pSwap_ApoE_hAAT_HBB2m1_SERPING1co21_BGH228 (SAA2 3' UTR)
cctgcaggcagctgcgcgctcgctcgctcactgaggccgcccgggcaaagcccgggcggcctcagtgagcgagcgagcgcgcagagagggagtggccaactccatcactaggggttcctgcggcctagtactaggctcagaggcacacaggagtttctgggctcaccctgcccccttccaacccctcagttcccatcctccagcagctgtttgtgtgctgcctctgaagtccacactgaacaaacttcagcctactcatgtccctaaaatgggcaaacattgcaagcagcaaacagcaaacacacagccctccctgcctgctgaccttggagctggggcagaggtcagagacctctctgggcccatgccacctccaacatccactcgaccccttggaatttcggtggagaggagcagaggttgtcctggcgtggtttaggtagtgtgagaggggtacccggggatcttgctaccagtggaacagccactaaggattctgcagtgagagcagagggccagctaagtggtactctcccagagactgtctgactcacgccaccccctccaccttggacacaggacgctgtggtttctgagccaggtacaatgactcctttcggtaagtgcagtggaagctgtacactgcccaggcaaagcgtccgggcagcgtaggcgggcgactcagatcccagccagtggacttagcccctgtttgctcctccgataactggggtgaccttggttaatattcaccagcagcctcccccgttgcccctctggatccactgcttaaatacggacgaggacagggccctgtctcctcagcttcaggcaccaccactgacctgggacagtgaatagatcttgagaacttcagggtgagtctatgggacccttgatgttttctttccccttcttttctatggttaagttcatgtcataggaaggggagaagtaacagggtacacatattgaccaaatcagggtaattttgcatttgtaattttaaaaaatgctttcttcttttaatatacttttttgtttatcttatttctaatactttccctaatctctttctttcagggcaataatgatacaatgtatcatgcctctttgcaccattctaaagaataacagtgataatttctgggttaaggcaatagcaatatttctgcatataaatatttctgcatataaattgtaactgatgtaagaggtttcatattgctaatagcagctacaatccagctaccattctgcttttattttctggttgggataaggctggattattctgagtccaagctaggcccttttgctaatcttgttcatacctcttatcttcctcccacagctcctgggcaacctgctggtctctctgctggcccatcactttggcaaagcactagtgccaccatggcctctaggctgactctgctgactctgctgctcctgctgctggctggggacagggccagctctaaccccaatgctacttctagctcctctcaggaccctgagagcctgcaggacaggggggagggcaaggtggccaccactgtgatctctaagatgctgtttgtggagcccatcctggaggtgagcagcctgcccaccaccaacagcaccaccaactctgccactaagatcactgccaacaccactgatgagcccaccacccagcccactactgagcccaccacccagcctactatccagcccacccagcccactacccagctgcccactgacagccctacccagcccaccactggcagcttctgccctgggcctgtgaccctgtgctctgacctggagagccattctactgaggctgtgctgggggatgccctggtggacttctctctgaagctgtaccatgctttctctgccatgaagaaggtggagactaacatggcttttagccccttcagcattgctagcctgctgacccaggtgctgctgggggctggggagaacactaagaccaacctggaatctatcctgagctaccccaaggacttcacctgtgtgcaccaggccctgaagggcttcaccaccaagggggtgacctctgtgagccagatcttccacagccctgacctggccatcagggatacttttgtgaatgccagcagaaccctgtactcttctagccccagggtgctgagcaataattctgatgctaacctggagctgatcaatacctgggtggctaagaataccaacaacaagattagcaggctgctggactctctgccttctgataccaggctggtgctgctgaatgccatttacctgtctgccaagtggaagaccacttttgaccctaagaagactaggatggagcctttccacttcaagaactctgtcattaaggtgcccatgatgaacagcaagaagtatcctgtggcccactttattgaccagactctgaaggccaaggtgggccagctgcagctgagccataacctgagcctggtgatcctggtgccccagaacctgaagcataggctggaggacatggagcaggctctgagcccctctgtgttcaaggctattatggagaagctggagatgagcaagttccagcccactctgctgaccctgcccagaatcaaggtgaccacctctcaggacatgctgagcatcatggaaaagctggagttctttgacttttcttatgacctgaatctgtgtggcctgactgaggatcctgatctgcaggtgtctgccatgcagcaccagactgtgctggagctgactgagactggggtggaggctgctgctgcttctgccatctctgtggccaggaccctgctggtgtttgaggtgcagcagcccttcctgtttgtgctgtgggaccagcagcacaagtttcctgtgttcatgggcagggtgtatgaccccagagcctgacatctagagcttcctcttcactctgctctcaggagacctggctatgaggccctcggggcagggatacaaagttagtgaggtctatgtccagagaagctgagatatggcatataataggcatctaataaatgcttaagaggtggaatctagagctgaattcctgcagccagggggatcagcctctactgtgccttctagttgccagccatctgttgtttgcccctcccccttgccttccttgaccctggaaggtgccactcccactgtcctttcctaataaaatgaggaaattgcatcacattgtctgagtaggtgtcattctattctggggggtggggtggggcaggacagcaagggggaggattgggaagacaatagcaggcatgctggggatgcagtgggctctatggcttctgaggcagaaagaaccagctggggctcgagatccactagggccgcaggaacccctagtgatggagttggccactccctctctgcgcgctcgctcgctcactgaggccgggcgaccaaaggtcgcccgacgcccgggctttgcccgggcggcctcagtgagcgagcgagcgcgcag

SEQ ID NO: 64 - DNA, 3540 bp, Artificial Sequence
  pSwap_ApoE_hAAT_HBB2m1_SERPING1co21_BGH228 (SAA2 5'&3' UTR)
cctgcaggcagctgcgcgctcgctcgctcactgaggccgcccgggcaaagcccgggcggcctcagtgagcgagcgagcgcgcagagagggagtggccaactccatcactaggggttcctgcggcctagtactaggctcagaggcacacaggagtttctgggctcaccctgcccccttccaacccctcagttcccatcctccagcagctgtttgtgtgctgcctctgaagtccacactgaacaaacttcagcctactcatgtccctaaaatgggcaaacattgcaagcagcaaacagcaaacacacagccctccctgcctgctgaccttggagctggggcagaggtcagagacctctctgggcccatgccacctccaacatccactcgaccccttggaatttcggtggagaggagcagaggttgtcctggcgtggtttaggtagtgtgagaggggtacccggggatcttgctaccagtggaacagccactaaggattctgcagtgagagcagagggccagctaagtggtactctcccagagactgtctgactcacgccaccccctccaccttggacacaggacgctgtggtttctgagccaggtacaatgactcctttcggtaagtgcagtggaagctgtacactgcccaggcaaagcgtccgggcagcgtaggcgggcgactcagatcccagccagtggacttagcccctgtttgctcctccgataactggggtgaccttggttaatattcaccagcagcctcccccgttgcccctctggatccactgcttaaatacggacgaggacagggccctgtctcctcagcttcaggcaccaccactgacctgggacagtgaatagatcttgagaacttcagggtgagtctatgggacccttgatgttttctttccccttcttttctatggttaagttcatgtcataggaaggggagaagtaacagggtacacatattgaccaaatcagggtaattttgcatttgtaattttaaaaaatgctttcttcttttaatatacttttttgtttatcttatttctaatactttccctaatctctttctttcagggcaataatgatacaatgtatcatgcctctttgcaccattctaaagaataacagtgataatttctgggttaaggcaatagcaatatttctgcatataaatatttctgcatataaattgtaactgatgtaagaggtttcatattgctaatagcagctacaatccagctaccattctgcttttattttctggttgggataaggctggattattctgagtccaagctaggcccttttgctaatcttgttcatacctcttatcttcctcccacagctcctgggcaacctgctggtctctctgctggcccatcactttggcaaagcactagtagggacccgcagctcagctacagcacagatcagccaccatggcctctaggctgactctgctgactctgctgctcctgctgctggctggggacagggccagctctaaccccaatgctacttctagctcctctcaggaccctgagagcctgcaggacaggggggagggcaaggtggccaccactgtgatctctaagatgctgtttgtggagcccatcctggaggtgagcagcctgcccaccaccaacagcaccaccaactctgccactaagatcactgccaacaccactgatgagcccaccacccagcccactactgagcccaccacccagcctactatccagcccacccagcccactacccagctgcccactgacagccctacccagcccaccactggcagcttctgccctgggcctgtgaccctgtgctctgacctggagagccattctactgaggctgtgctgggggatgccctggtggacttctctctgaagctgtaccatgctttctctgccatgaagaaggtggagactaacatggcttttagccccttcagcattgctagcctgctgacccaggtgctgctgggggctggggagaacactaagaccaacctggaatctatcctgagctaccccaaggacttcacctgtgtgcaccaggccctgaagggcttcaccaccaagggggtgacctctgtgagccagatcttccacagccctgacctggccatcagggatacttttgtgaatgccagcagaaccctgtactcttctagccccagggtgctgagcaataattctgatgctaacctggagctgatcaatacctgggtggctaagaataccaacaacaagattagcaggctgctggactctctgccttctgataccaggctggtgctgctgaatgccatttacctgtctgccaagtggaagaccacttttgaccctaagaagactaggatggagcctttccacttcaagaactctgtcattaaggtgcccatgatgaacagcaagaagtatcctgtggcccactttattgaccagactctgaaggccaaggtgggccagctgcagctgagccataacctgagcctggtgatcctggtgccccagaacctgaagcataggctggaggacatggagcaggctctgagcccctctgtgttcaaggctattatggagaagctggagatgagcaagttccagcccactctgctgaccctgcccagaatcaaggtgaccacctctcaggacatgctgagcatcatggaaaagctggagttctttgacttttcttatgacctgaatctgtgtggcctgactgaggatcctgatctgcaggtgtctgccatgcagcaccagactgtgctggagctgactgagactggggtggaggctgctgctgcttctgccatctctgtggccaggaccctgctggtgtttgaggtgcagcagcccttcctgtttgtgctgtgggaccagcagcacaagtttcctgtgttcatgggcagggtgtatgaccccagagcctgacatctagagcttcctcttcactctgctctcaggagacctggctatgaggccctcggggcagggatacaaagttagtgaggtctatgtccagagaagctgagatatggcatataataggcatctaataaatgcttaagaggtggaatctagagctgaattcctgcagccagggggatcagcctctactgtgccttctagttgccagccatctgttgtttgcccctcccccttgccttccttgaccctggaaggtgccactcccactgtcctttcctaataaaatgaggaaattgcatcacattgtctgagtaggtgtcattctattctggggggtggggtggggcaggacagcaagggggaggattgggaagacaatagcaggcatgctggggatgcagtgggctctatggcttctgaggcagaaagaaccagctggggctcgagatccactagggccgcaggaacccctagtgatggagttggccactccctctctgcgcgctcgctcgctcactgaggccgggcgaccaaaggtcgcccgacgcccgggctttgcccgggcggcctcagtgagcgagcgagcgcgcag

SEQ ID NO: 65 - DNA, 4088 bp, Artificial Sequence
  pSwap_ApoE_hAAT(APRE-SAA2)_HBB2m1_(SAA2 5')SERPING1co21_BGH228
cctgcaggcagctgcgcgctcgctcgctcactgaggccgcccgggcaaagcccgggcggcctcagtgagcgagcgagcgcgcagagagggagtggccaactccatcactaggggttcctgcggcctagtactaggctcagaggcacacaggagtttctgggctcaccctgcccccttccaacccctcagttcccatcctccagcagctgtttgtgtgctgcctctgaagtccacactgaacaaacttcagcctactcatgtccctaaaatgggcaaacattgcaagcagcaaacagcaaacacacagccctccctgcctgctgaccttggagctggggcagaggtcagagacctctctgggcccatgccacctccaacatccactcgaccccttggaatttcggtggagaggagcagaggttgtcctggcgtggtttaggtagtgtgagaggggtacccggggatcttgctaccagtggaacagccactaaggattctgcagtgagagcagagggccagctaagtggtactctcccagagactgtctgactcacgccaccccctccaccttggacacaggacgctgtggtttctgagccaggtacaatgactcctttcggtaagtgcagtggaagctgtacactgcccaggcaaagcgtccgggcagcgtaggcgggcgactcagatcccagccagtggacttagcccctgtttgctcctccgataactggggtgaccttggttaatattcaccagcagcctcccccgttgcccctctggatccactgcttaaatacggacgaggacagggccctgtctcctcagcttcaggcaccaccactgacctgggacagtgaatagatcttgggcacgtccccagctgggctgcctatttaacgcaccacactctcattctcccaaggtggggctccaggactaggctggggcagcagaaagtccccctctctacattgtccttggctcaggagccaacttagaaaaagcatttccaaattggctaagccagcggagcagagattttctgtgctgagaaatatcaggacatccagaggggtggaaggaggcttccagggcacacatgagatgtggcaggggtaggctgtccgttttaaagcttaaagctttagacatgaactcacagggatttcagtcagggtcatctgccatgtggcccagcagggcccatcctgaggaaatgaccggtatagtcaggagctggctgaagagctgccctcactccacaccttccagcagcccaggtgccgccatcacggggctcccactggcatctctgcagctgcacttcccccaatgctgaggagcagagctgatctagcaccctgtccattgccaaggcacagcaaacctctcttgttcccataggttacacaactgggataaatgacccgggatgaagaaaccaccggcatccaggaacttgtcttagaccagtttgtaggggaaatgacctgcagggactttccccagggaccacatccagcttttcttccctcccaagagaccagcaaggctctgagaacttcagggtgagtctatgggacccttgatgttttctttccccttcttttctatggttaagttcatgtcataggaaggggagaagtaacagggtacacatattgaccaaatcagggtaattttgcatttgtaattttaaaaaatgctttcttcttttaatatacttttttgtttatcttatttctaatactttccctaatctctttctttcagggcaataatgatacaatgtatcatgcctctttgcaccattctaaagaataacagtgataatttctgggttaaggcaatagcaatatttctgcatataaatatttctgcatataaattgtaactgatgtaagaggtttcatattgctaatagcagctacaatccagctaccattctgcttttattttctggttgggataaggctggattattctgagtccaagctaggcccttttgctaatcttgttcatacctcttatcttcctcccacagctcctgggcaacctgctggtctctctgctggcccatcactttggcaaagcactagtgagggacccgcagctcagctacagcacagatcagccaccatggcctctaggctgactctgctgactctgctgctcctgctgctggctggggacagggccagctctaaccccaatgctacttctagctcctctcaggaccctgagagcctgcaggacaggggggagggcaaggtggccaccactgtgatctctaagatgctgtttgtggagcccatcctggaggtgagcagcctgcccaccaccaacagcaccaccaactctgccactaagatcactgccaacaccactgatgagcccaccacccagcccactactgagcccaccacccagcctactatccagcccacccagcccactacccagctgcccactgacagccctacccagcccaccactggcagcttctgccctgggcctgtgaccctgtgctctgacctggagagccattctactgaggctgtgctgggggatgccctggtggacttctctctgaagctgtaccatgctttctctgccatgaagaaggtggagactaacatggcttttagccccttcagcattgctagcctgctgacccaggtgctgctgggggctggggagaacactaagaccaacctggaatctatcctgagctaccccaaggacttcacctgtgtgcaccaggccctgaagggcttcaccaccaagggggtgacctctgtgagccagatcttccacagccctgacctggccatcagggatacttttgtgaatgccagcagaaccctgtactcttctagccccagggtgctgagcaataattctgatgctaacctggagctgatcaatacctgggtggctaagaataccaacaacaagattagcaggctgctggactctctgccttctgataccaggctggtgctgctgaatgccatttacctgtctgccaagtggaagaccacttttgaccctaagaagactaggatggagcctttccacttcaagaactctgtcattaaggtgcccatgatgaacagcaagaagtatcctgtggcccactttattgaccagactctgaaggccaaggtgggccagctgcagctgagccataacctgagcctggtgatcctggtgccccagaacctgaagcataggctggaggacatggagcaggctctgagcccctctgtgttcaaggctattatggagaagctggagatgagcaagttccagcccactctgctgaccctgcccagaatcaaggtgaccacctctcaggacatgctgagcatcatggaaaagctggagttctttgacttttcttatgacctgaatctgtgtggcctgactgaggatcctgatctgcaggtgtctgccatgcagcaccagactgtgctggagctgactgagactggggtggaggctgctgctgcttctgccatctctgtggccaggaccctgctggtgtttgaggtgcagcagcccttcctgtttgtgctgtgggaccagcagcacaagtttcctgtgttcatgggcagggtgtatgaccccagagcctgacatctagagctgaattcctgcagccagggggatcagcctctactgtgccttctagttgccagccatctgttgtttgcccctcccccttgccttccttgaccctggaaggtgccactcccactgtcctttcctaataaaatgaggaaattgcatcacattgtctgagtaggtgtcattctattctggggggtggggtggggcaggacagcaagggggaggattgggaagacaatagcaggcatgctggggatgcagtgggctctatggcttctgaggcagaaagaaccagctggggctcgagatccactagggccgcaggaacccctagtgatggagttggccactccctctctgcgcgctcgctcgctcactgaggccgggcgaccaaaggtcgcccgacgcccgggctttgcccgggcggcctcagtgagcgagcgagcgcgcag

SEQ ID NO: 66 - DNA, 3719 bp, Artificial Sequence
  pSwap_(2x ADRES)ApoE_hAAT_HBB2m1_SERPING1co21_BGH228
cctgcaggcagctgcgcgctcgctcgctcactgaggccgcccgggcaaagcccgggcggcctcagtgagcgagcgagcgcgcagagagggagtggccaactccatcactaggggttcctgcggcctagtactgcgcaaagtcaacacaagcctctccaccgtgtgtccatgtttatgtgtatgcgctgtgccccgtcatgccacctggacgcagggactccagtgacctctccttgcacaagcctctgctggtttgggaaagattggcatgacatcagccaagctctggccttgccttttttccctgcgcaaagtcaacacaagcctctccaccgtgtgtccatgtttatgtgtatgcgctgtgccccgtcatgccacctggacgcagggactccagtgacctctccttgcacaagcctctgctggtttgggaaagattggcatgacatcagccaagctctggccttgccttttttccctagtactaggctcagaggcacacaggagtttctgggctcaccctgcccccttccaacccctcagttcccatcctccagcagctgtttgtgtgctgcctctgaagtccacactgaacaaacttcagcctactcatgtccctaaaatgggcaaacattgcaagcagcaaacagcaaacacacagccctccctgcctgctgaccttggagctggggcagaggtcagagacctctctgggcccatgccacctccaacatccactcgaccccttggaatttcggtggagaggagcagaggttgtcctggcgtggtttaggtagtgtgagaggggtacccggggatcttgctaccagtggaacagccactaaggattctgcagtgagagcagagggccagctaagtggtactctcccagagactgtctgactcacgccaccccctccaccttggacacaggacgctgtggtttctgagccaggtacaatgactcctttcggtaagtgcagtggaagctgtacactgcccaggcaaagcgtccgggcagcgtaggcgggcgactcagatcccagccagtggacttagcccctgtttgctcctccgataactggggtgaccttggttaatattcaccagcagcctcccccgttgcccctctggatccactgcttaaatacggacgaggacagggccctgtctcctcagcttcaggcaccaccactgacctgggacagtgaatagatcttgagaacttcagggtgagtctatgggacccttgatgttttctttccccttcttttctatggttaagttcatgtcataggaaggggagaagtaacagggtacacatattgaccaaatcagggtaattttgcatttgtaattttaaaaaatgctttcttcttttaatatacttttttgtttatcttatttctaatactttccctaatctctttctttcagggcaataatgatacaatgtatcatgcctctttgcaccattctaaagaataacagtgataatttctgggttaaggcaatagcaatatttctgcatataaatatttctgcatataaattgtaactgatgtaagaggtttcatattgctaatagcagctacaatccagctaccattctgcttttattttctggttgggataaggctggattattctgagtccaagctaggcccttttgctaatcttgttcatacctcttatcttcctcccacagctcctgggcaacctgctggtctctctgctggcccatcactttggcaaagcactagtgccaccatggcctctaggctgactctgctgactctgctgctcctgctgctggctggggacagggccagctctaaccccaatgctacttctagctcctctcaggaccctgagagcctgcaggacaggggggagggcaaggtggccaccactgtgatctctaagatgctgtttgtggagcccatcctggaggtgagcagcctgcccaccaccaacagcaccaccaactctgccactaagatcactgccaacaccactgatgagcccaccacccagcccactactgagcccaccacccagcctactatccagcccacccagcccactacccagctgcccactgacagccctacccagcccaccactggcagcttctgccctgggcctgtgaccctgtgctctgacctggagagccattctactgaggctgtgctgggggatgccctggtggacttctctctgaagctgtaccatgctttctctgccatgaagaaggtggagactaacatggcttttagccccttcagcattgctagcctgctgacccaggtgctgctgggggctggggagaacactaagaccaacctggaatctatcctgagctaccccaaggacttcacctgtgtgcaccaggccctgaagggcttcaccaccaagggggtgacctctgtgagccagatcttccacagccctgacctggccatcagggatacttttgtgaatgccagcagaaccctgtactcttctagccccagggtgctgagcaataattctgatgctaacctggagctgatcaatacctgggtggctaagaataccaacaacaagattagcaggctgctggactctctgccttctgataccaggctggtgctgctgaatgccatttacctgtctgccaagtggaagaccacttttgaccctaagaagactaggatggagcctttccacttcaagaactctgtcattaaggtgcccatgatgaacagcaagaagtatcctgtggcccactttattgaccagactctgaaggccaaggtgggccagctgcagctgagccataacctgagcctggtgatcctggtgccccagaacctgaagcataggctggaggacatggagcaggctctgagcccctctgtgttcaaggctattatggagaagctggagatgagcaagttccagcccactctgctgaccctgcccagaatcaaggtgaccacctctcaggacatgctgagcatcatggaaaagctggagttctttgacttttcttatgacctgaatctgtgtggcctgactgaggatcctgatctgcaggtgtctgccatgcagcaccagactgtgctggagctgactgagactggggtggaggctgctgctgcttctgccatctctgtggccaggaccctgctggtgtttgaggtgcagcagcccttcctgtttgtgctgtgggaccagcagcacaagtttcctgtgttcatgggcagggtgtatgaccccagagcctgacatctagagctgaattcctgcagccagggggatcagcctctactgtgccttctagttgccagccatctgttgtttgcccctcccccttgccttccttgaccctggaaggtgccactcccactgtcctttcctaataaaatgaggaaattgcatcacattgtctgagtaggtgtcattctattctggggggtggggtggggcaggacagcaagggggaggattgggaagacaatagcaggcatgctggggatgcagtgggctctatggcttctgaggcagaaagaaccagctggggctcgagatccactagggccgcaggaacccctagtgatggagttggccactccctctctgcgcgctcgctcgctcactgaggccgggcgaccaaaggtcgcccgacgcccgggctttgcccgggcggcctcagtgagcgagcgagcgcgcag

SEQ ID NO: 67 - DNA, 3382 bp, Artificial Sequence
  pSwap_ApoE_hAAT_HBB2m1_SERPING1co21(+RIDD1x)_BGH228
cctgcaggcagctgcgcgctcgctcgctcactgaggccgcccgggcaaagcccgggcggcctcagtgagcgagcgagcgcgcagagagggagtggccaactccatcactaggggttcctgcggcctagtactaggctcagaggcacacaggagtttctgggctcaccctgcccccttccaacccctcagttcccatcctccagcagctgtttgtgtgctgcctctgaagtccacactgaacaaacttcagcctactcatgtccctaaaatgggcaaacattgcaagcagcaaacagcaaacacacagccctccctgcctgctgaccttggagctggggcagaggtcagagacctctctgggcccatgccacctccaacatccactcgaccccttggaatttcggtggagaggagcagaggttgtcctggcgtggtttaggtagtgtgagaggggtacccggggatcttgctaccagtggaacagccactaaggattctgcagtgagagcagagggccagctaagtggtactctcccagagactgtctgactcacgccaccccctccaccttggacacaggacgctgtggtttctgagccaggtacaatgactcctttcggtaagtgcagtggaagctgtacactgcccaggcaaagcgtccgggcagcgtaggcgggcgactcagatcccagccagtggacttagcccctgtttgctcctccgataactggggtgaccttggttaatattcaccagcagcctcccccgttgcccctctggatccactgcttaaatacggacgaggacagggccctgtctcctcagcttcaggcaccaccactgacctgggacagtgaatagatcttgagaacttcagggtgagtctatgggacccttgatgttttctttccccttcttttctatggttaagttcatgtcataggaaggggagaagtaacagggtacacatattgaccaaatcagggtaattttgcatttgtaattttaaaaaatgctttcttcttttaatatacttttttgtttatcttatttctaatactttccctaatctctttctttcagggcaataatgatacaatgtatcatgcctctttgcaccattctaaagaataacagtgataatttctgggttaaggcaatagcaatatttctgcatataaatatttctgcatataaattgtaactgatgtaagaggtttcatattgctaatagcagctacaatccagctaccattctgcttttattttctggttgggataaggctggattattctgagtccaagctaggcccttttgctaatcttgttcatacctcttatcttcctcccacagctcctgggcaacctgctggtctctctgctggcccatcactttggcaaagcactagtgccaccatggcctctaggctgactctgctgactctgctgctcctgctgctggctggggacagggccagctctaaccccaatgctacttctagctcctctcaggaccctgagagcctgcaggacaggggggagggcaaggtggccaccactgtgatctctaagatgctgtttgtggagcccatcctggaggtgagcagcctgcccaccaccaacagcaccaccaactctgccactaagatcactgccaacaccactgatgagcccaccacccagcccactactgagcccaccacccagcctactatccagcccacccagcccactacccagctgcccactgacagccctacccagcccaccactggcagcttctgccctgggcctgtgaccctgtgctctgacctggagagccattctactgaggctgtgctgggggatgccctggtggacttctctctgaagctgtaccatgctttctctgccatgaagaaggtggagactaacatggcttttagccccttcagcattgctagcctgctgacccaggtgctgctgggggctggggagaacactaagaccaacctggaatctatcctgagctaccccaaggacttcacctgtgtgcaccaggccctgaagggcttcaccaccaagggggtgacctctgtgagccagatcttccacagccctgacctggccatcagggatacttttgtgaatgccagcagaaccctgtactcttctagccccagggtgctgagcaataattctgatgctaacctggagctgatcaatacctgggtggctaagaataccaacaacaagattagcaggctgctggactctctgccttctgataccaggctggtgctgctgaatgccatttacctgtctgccaagtggaagaccacttttgaccctaagaagactaggatggagcctttccacttcaagaactctgtcattaaggtgcccatgatgaacagcaagaagtatcctgtggcccactttattgaccagactctgaaggccaaggtgggccagctgcagctgagccataacctgagcctggtgatcctggtgccccagaacctgaagcataggctggaggacatggagcaggctctgagcccctctgtgttcaaggctattatggagaagctggagatgagcaagttccagcccactctgctgaccctgcccagaatcaaggtgaccacctctcaggacatgctgagcatcatggaaaagctggagttctttgacttttcttatgacctgaatctgtgtggcctgactgaggatcctgatctgcaggtgtctgccatgcagcaccagactgtgctggagctgactgagactggggtggaggctgctgctgcttctgccatctctgtggccaggaccctgctggtgtttgaggtgcagcagcccttcctgtttgtgctgtgggaccagcagcacaagtttcctgtgttcatgggcagggtgtatgaccccagagcctgacatctagagcacctctgcagcaggtctagaattcctgcagccagggggatcagcctctactgtgccttctagttgccagccatctgttgtttgcccctcccccttgccttccttgaccctggaaggtgccactcccactgtcctttcctaataaaatgaggaaattgcatcacattgtctgagtaggtgtcattctattctggggggtggggtggggcaggacagcaagggggaggattgggaagacaatagcaggcatgctggggatgcagtgggctctatggcttctgaggcagaaagaaccagctggggctcgagatccactagggccgcaggaacccctagtgatggagttggccactccctctctgcgcgctcgctcgctcactgaggccgggcgaccaaaggtcgcccgacgcccgggctttgcccgggcggcctcagtgagcgagcgagcgcgcag

SEQ ID NO: 68 - DNA, 3415 bp, Artificial Sequence
  pSwap_ApoE_hAAT_HBB2m1_SERPING1co21(+RIDD3x)_BGH228
cctgcaggcagctgcgcgctcgctcgctcactgaggccgcccgggcaaagcccgggcggcctcagtgagcgagcgagcgcgcagagagggagtggccaactccatcactaggggttcctgcggcctagtactaggctcagaggcacacaggagtttctgggctcaccctgcccccttccaacccctcagttcccatcctccagcagctgtttgtgtgctgcctctgaagtccacactgaacaaacttcagcctactcatgtccctaaaatgggcaaacattgcaagcagcaaacagcaaacacacagccctccctgcctgctgaccttggagctggggcagaggtcagagacctctctgggcccatgccacctccaacatccactcgaccccttggaatttcggtggagaggagcagaggttgtcctggcgtggtttaggtagtgtgagaggggtacccggggatcttgctaccagtggaacagccactaaggattctgcagtgagagcagagggccagctaagtggtactctcccagagactgtctgactcacgccaccccctccaccttggacacaggacgctgtggtttctgagccaggtacaatgactcctttcggtaagtgcagtggaagctgtacactgcccaggcaaagcgtccgggcagcgtaggcgggcgactcagatcccagccagtggacttagcccctgtttgctcctccgataactggggtgaccttggttaatattcaccagcagcctcccccgttgcccctctggatccactgcttaaatacggacgaggacagggccctgtctcctcagcttcaggcaccaccactgacctgggacagtgaatagatcttgagaacttcagggtgagtctatgggacccttgatgttttctttccccttcttttctatggttaagttcatgtcataggaaggggagaagtaacagggtacacatattgaccaaatcagggtaattttgcatttgtaattttaaaaaatgctttcttcttttaatatacttttttgtttatcttatttctaatactttccctaatctctttctttcagggcaataatgatacaatgtatcatgcctctttgcaccattctaaagaataacagtgataatttctgggttaaggcaatagcaatatttctgcatataaatatttctgcatataaattgtaactgatgtaagaggtttcatattgctaatagcagctacaatccagctaccattctgcttttattttctggttgggataaggctggattattctgagtccaagctaggcccttttgctaatcttgttcatacctcttatcttcctcccacagctcctgggcaacctgctggtctctctgctggcccatcactttggcaaagcactagtgccaccatggcctctaggctgactctgctgactctgctgctcctgctgctggctggggacagggccagctctaaccccaatgctacttctagctcctctcaggaccctgagagcctgcaggacaggggggagggcaaggtggccaccactgtgatctctaagatgctgtttgtggagcccatcctggaggtgagcagcctgcccaccaccaacagcaccaccaactctgccactaagatcactgccaacaccactgatgagcccaccacccagcccactactgagcccaccacccagcctactatccagcccacccagcccactacccagctgcccactgacagccctacccagcccaccactggcagcttctgccctgggcctgtgaccctgtgctctgacctggagagccattctactgaggctgtgctgggggatgccctggtggacttctctctgaagctgtaccatgctttctctgccatgaagaaggtggagactaacatggcttttagccccttcagcattgctagcctgctgacccaggtgctgctgggggctggggagaacactaagaccaacctggaatctatcctgagctaccccaaggacttcacctgtgtgcaccaggccctgaagggcttcaccaccaagggggtgacctctgtgagccagatcttccacagccctgacctggccatcagggatacttttgtgaatgccagcagaaccctgtactcttctagccccagggtgctgagcaataattctgatgctaacctggagctgatcaatacctgggtggctaagaataccaacaacaagattagcaggctgctggactctctgccttctgataccaggctggtgctgctgaatgccatttacctgtctgccaagtggaagaccacttttgaccctaagaagactaggatggagcctttccacttcaagaactctgtcattaaggtgcccatgatgaacagcaagaagtatcctgtggcccactttattgaccagactctgaaggccaaggtgggccagctgcagctgagccataacctgagcctggtgatcctggtgccccagaacctgaagcataggctggaggacatggagcaggctctgagcccctctgtgttcaaggctattatggagaagctggagatgagcaagttccagcccactctgctgaccctgcccagaatcaaggtgaccacctctcaggacatgctgagcatcatggaaaagctggagttctttgacttttcttatgacctgaatctgtgtggcctgactgaggatcctgatctgcaggtgtctgccatgcagcaccagactgtgctggagctgactgagactggggtggaggctgctgctgcttctgccatctctgtggccaggaccctgctggtgtttgaggtgcagcagcccttcctgtttgtgctgtgggaccagcagcacaagtttcctgtgttcatgggcagggtgtatgaccccagagcctgacatctagagcacctctgcagcaggaagtctctgcagaagataacacctgcagagtggtctagaattcctgcagccagggggatcagcctctactgtgccttctagttgccagccatctgttgtttgcccctcccccttgccttccttgaccctggaaggtgccactcccactgtcctttcctaataaaatgaggaaattgcatcacattgtctgagtaggtgtcattctattctggggggtggggtggggcaggacagcaagggggaggattgggaagacaatagcaggcatgctggggatgcagtgggctctatggcttctgaggcagaaagaaccagctggggctcgagatccactagggccgcaggaacccctagtgatggagttggccactccctctctgcgcgctcgctcgctcactgaggccgggcgaccaaaggtcgcccgacgcccgggctttgcccgggcggcctcagtgagcgagcgagcgcgcag

SEQ ID NO: 69 - DNA, 3382 bp, Artificial Sequence; identical to SEQ ID NO: 67
  pSwap_ApoE_hAAT_HBB2m1_SERPING1co21(+RIDD1xBlos)_BGH228

SEQ ID NO: 70 - DNA, 108 bp, Artificial Sequence
  pAAV 5' ITR (AAV2 ITR 5')
ctgcgcgctcgctcgctcactgaggccgcccgggcaaagcccgggcggcctcagtgagcgagcgagcgcgcagagagggagtggccaactccatcactaggggttcct

SEQ ID NO: 71 - DNA, 130 bp, Artificial Sequence
  pAAV 3' ITR (AAV ITR 3')
ctgcgcgctcgctcgctcactgaggccgcccgggcaaagcccgggcgtcgggcgacctttggtcgcccggcctcagtgagcgagcgagcgcgcagagagggagtggccaactccatcactaggggttcct

SEQ ID NO: 72 - DNA, 108 bp, Artificial Sequence; identical to SEQ ID NO: 70
  pSWAP 5' ITR

SEQ ID NO: 73 - DNA, 130 bp, Artificial Sequence; identical to SEQ ID NO: 71
  pSWAP 3' ITR

SEQ ID NO: 74 - DNA, 321 bp, Artificial Sequence
  ApoE Enhancer
aggctcagaggcacacaggagtttctgggctcaccctgcccccttccaacccctcagttcccatcctccagcagctgtttgtgtgctgcctctgaagtccacactgaacaaacttcagcctactcatgtccctaaaatgggcaaacattgcaagcagcaaacagcaaacacacagccctccctgcctgctgaccttggagctggggcagaggtcagagacctctctgggcccatgccacctccaacatccactcgaccccttggaatttcggtggagaggagcagaggttgtcctggcgtggtttaggtagtgtgagaggg

SEQ ID NO: 75 - DNA, 641 bp, Artificial Sequence
  2xApoE
aggctcagaggcacacaggagtttctgggctcaccctgcccccttccaacccctcagttcccatcctccagcagctgtttgtgtgctgcctctgaagtccacactgaacaaacttcagcctactcatgtccctaaaatgggcaaacattgcaagcagcaaacagcaaacacacagccctccctgcctgctgaccttggagctggggcagaggtcagagacctctctgggcccatgccacctccaacatccactcgaccccttggaatttcggtggagaggagcagaggttgtcctggcgggtttaggtagtgtgagagggaggctcagaggcacacaggagtttctgggctcaccctgcccccttccaacccctcagttcccatcctccagcagctgtttgtgtgctgcctctgaagtccacactgaacaaacttcagcctactcatgtccctaaaatgggcaaacattgcaagcagcaaacagcaaacacacagccctccctgcctgctgaccttggagctggggcagaggtcagagacctctctgggcccatgccacctccaacatccactcgaccccttggaatttcggtggagaggagcagaggttgtcctggcgtggtttaggtagtgtgagaggg

SEQ ID NO: 76 - DNA, 1283 bp, Artificial Sequence
  4xApoE
aggctcagaggcacacaggagtttctgggctcaccctgcccccttccaacccctcagttcccatcctccagcagctgtttgtgtgctgcctctgaagtccacactgaacaaacttcagcctactcatgtccctaaaatgggcaaacattgcaagcagcaaacagcaaacacacagccctccctgcctgctgaccttggagctggggcagaggtcagagacctctctgggcccatgccacctccaacatccactcgaccccttggaatttcggtggagaggagcagaggttgtcctggcgggtttaggtagtgtgagagggaggctcagaggcacacaggagtttctgggctcaccctgcccccttccaacccctcagttcccatcctccagcagctgtttgtgtgctgcctctgaagtccacactgaacaaacttcagcctactcatgtccctaaaatgggcaaacattgcaagcagcaaacagcaaacacacagccctccctgcctgctgaccttggagctggggcagaggtcagagacctctctgggcccatgccacctccaacatccactcgaccccttggaatttcggtggagaggagcagaggttgtcctggcgtggtttaggtagtgtgagagggaggctcagaggcacacaggagtttctgggctcaccctgcccccttccaacccctcagttcccatcctccagcagctgtttgtgtgctgcctctgaagtccacactgaacaaacttcagcctactcatgtccctaaaatgggcaaacattgcaagcagcaaacagcaaacacacagccctccctgcctgctgaccttggagctggggcagaggtcagagacctctctgggcccatgccacctccaacatccactcgaccccttggaatttcggtggagaggagcagaggttgtcctggcgtggtttaggtagtgtgagagggaggctcagaggcacacaggagtttctgggctcaccctgcccccttccaacccctcagttcccatcctccagcagctgtttgtgtgctgcctctgaagtccacactgaacaaacttcagcctactcatgtccctaaaatgggcaaacattgcaagcagcaaacagcaaacacacagccctccctgcctgctgaccttggagctggggcagaggtcagagacctctctgggcccatgccacctccaacatccactcgaccccttggaatttcggtggagaggagcagaggttgtcctggcgtggtttaggtagtgtgagaggg

SEQ ID NO: 77 - DNA, 690 bp, Artificial Sequence
  SAA2 APRE
tgggcacgtccccagctgggctgcctatttaacgcaccacactctcattctcccaaggtggggctccaggactaggctggggcagcagaaagtccccctctctacattgtccttggctcaggagccaacttagaaaaagcatttccaaattggctaagccagcggagcagagattttctgtgctgagaaatatcaggacatccagaggggtggaaggaggcttccagggcacacatgagatgtggcaggggtaggctgtccgttttaaagcttaaagctttagacatgaactcacagggatttcagtcagggtcatctgccatgtggcccagcagggcccatcctgaggaaatgaccggtatagtcaggagctggctgaagagctgccctcactccacaccttccagcagcccaggtgccgccatcacggggctcccactggcatctctgcagctgcacttcccccaatgctgaggagcagagctgatctagcaccctgtccattgccaaggcacagcaaacctctcttgttcccataggttacacaactgggataaatgacccgggatgaagaaaccaccggcatccaggaacttgtcttagaccagtttgtaggggaaatgacctgcagggactttccccagggaccacatccagcttttcttccctcccaagagaccagcaaggctc

SEQ ID NO: 78 - DNA, 348 bp, Artificial Sequence
  2x ADRES
gcgcaaagtcaacacaagcctctccaccgtgtgtccatgtttatgtgtatgcgctgtgccccgtcatgccacctggacgcagggactccagtgacctctccttgcacaagcctctgctggtttgggaaagattggcatgacatcagccaagctctggccttgccttttttccctgcgcaaagtcaacacaagcctctccaccgtgtgtccatgtttatgtgtatgcgctgtgccccgtcatgccacctggacgcagggactccagtgacctctccttgcacaagcctctgctggtttgggaaagattggcatgacatcagccaagctctggccttgccttttttccct

SEQ ID NO: 79 - DNA, 397 bp, Artificial Sequence
  hAAT promoter
gatcttgctaccagtggaacagccactaaggattctgcagtgagagcagagggccagctaagtggtactctcccagagactgtctgactcacgccaccccctccaccttggacacaggacgctgtggtttctgagccaggtacaatgactcctttcggtaagtgcagtggaagctgtacactgcccaggcaaagcgtccgggcagcgtaggcgggcgactcagatcccagccagtggacttagcccctgtttgctcctccgataactggggtgaccttggttaatattcaccagcagcctcccccgttgcccctctggatccactgcttaaatacggacgaggacagggccctgtctcctcagcttcaggcaccaccactgacctgggacagtgaat

SEQ ID NO: 80 - DNA, 392 bp, Artificial Sequence
  hAATv18
gatcttgctaccagtggaacagccactaaggattctgcagtgagagcagagggccagctaagtggtactctcccagagactgtctgactcagccaccccctccaccttggacacaggatgctgtggtttctgagccaggtacaatgactcctttggtaagtgcagtggaagctgtacactgcccaggcaaaggtctgggcaggtagggggtgactcagatcccagccagtggacttagcccctgtttgctcctctgataactggggtgaccttggttaatattcaccagcagcctcccctgttgcccctctggatccactgcttaaatatggatgaggacagggccctgtctcctcagcttcaggcaccaccactgacctgggacagtgaat

SEQ ID NO: 81 - DNA, 543 bp, Artificial Sequence
  HBB2m1 intron
gatcctgagaacttcagggtgagtctatgggacccttgatgttttctttccccttcttttctatggttaagttcatgtcataggaaggggagaagtaacagggtacacatattgaccaaatcagggtaattttgcatttgtaattttaaaaaatgctttcttcttttaatatacttttttgtttatcttatttctaatactttccctaatctctttctttcagggcaataatgatacaatgtatcatgcctctttgcaccattctaaagaataacagtgataatttctgggttaaggcaatagcaatatttctgcatataaatatttctgcatataaattgtaactgatgtaagaggtttcatattgctaatagcagctacaatccagctaccattctgcttttattttctggttgggataaggctggattattctgagtccaagctaggcccttttgctaatcttgttcatacctcttatcttcctcccacagctcctgggcaacctgctggtctctctgctggcccatcactttggcaaag

SEQ ID NO: 82 - DNA, 543 bp, Artificial Sequence
  HBB2m1(-ATG)
gatcctgagaacttcagggtgagtctttgggacccttgttgttttctttccccttcttttctttggttaagttcttgtcataggaaggggagaagtaacagggtacacatattgaccaaatcagggtaattttgcatttgtaattttaaaaattgctttcttcttttaatatacttttttgtttatcttatttctaatactttccctaatctctttctttcagggcaatattgatacattgtatcttgcctctttgcaccattctaaagaataacagtgataatttctgggttaaggcaatagcaatatttctgcatataaatatttctgcatataaattgtaactgttgtaagaggtttcatattgctaatagcagctacaatccagctaccattctgcttttattttctggttgggataaggctggattattctgagtccaagctaggcccttttgctaatcttgttcatacctcttatcttcctcccacagctcctgggcaacctgctggtctctctgctggcccatcactttggcaaag

SEQ ID NO: 83 - DNA, 228 bp, Artificial Sequence
  BGH228 polyA
ctactgtgccttctagttgccagccatctgttgtttgcccctcccccttgccttccttgaccctggaaggtgccactcccactgtcctttcctaataaaatgaggaaattgcatcacattgtctgagtaggtgtcattctattctggggggtggggtggggcaggacagcaagggggaggattgggaagacaatagcaggcatgctggggatgcagtgggctctatgg

SEQ ID NO: 84 - DNA, 66 bp, Artificial Sequence
  SERPING1-WT Signal peptide
atggcctccaggctgaccctgctgaccctcctgctgctgctgctggctggggatagagcctcctca

SEQ ID NO: 85 - DNA, 54 bp, Artificial Sequence
  Sp7 Signal peptide variant
atggcctttctgtggctgctgtcctgctgggccctgctggggaccacctttggc

SEQ ID NO: 86 - DNA, 54 bp, Artificial Sequence
  Sp7 Signal peptide variant
atggccttcctgtggctgctgtcctgctgggcactgctgggcaccacatttggc

SEQ ID NO: 87 - DNA, 54 bp, Artificial Sequence
  Sp7 Signal peptide variant
atggccttcctgtggctgctgagctgctgggccctgctggggaccacctttggg

SEQ ID NO: 88 - DNA, 54 bp, Artificial Sequence
  Sp7 Signal peptide variant
atggccttcctgtggctcctgagctgctgggccctcctggggaccacctttggg

SEQ ID NO: 89 - DNA, 54 bp, Artificial Sequence
  Sp7 Signal peptide variant
atggccttcctgtggctgctgagctgctgggccctgctggggaccacatttggc

SEQ ID NO: 90 - DNA, 54 bp, Artificial Sequence
  ALB Signal peptide
atgaagtgggtaacctttatttcccttctttttctctttagctcggcttattcc

SEQ ID NO: 91 - DNA, 54 bp, Artificial Sequence
  ORM1 Signal peptide
atggcgctgtcctgggttcttacagtcctgagcctcctacctctgctggaagcc

SEQ ID NO: 92 - DNA, 57 bp, Artificial Sequence
  TF Signal peptide
atgaggctcgccgtgggagccctgctggtctgcgccgtcctggggctgtgtctggct

SEQ ID NO: 93 - DNA, 57 bp, Artificial Sequence
  AMPB Signal peptide
atgaggagcctcggggccctgctcttgctgctgagcgcctgcctggcggtgagcgct

SEQ ID NO: 94 - DNA, 84 bp, Artificial Sequence
  LAMP1 Signal peptide
atggcggcccccggcagcgcccggcgacccctgctgctgctactgctgttgctgctgctcggcctcatgcattgtgcgtcagca

SEQ ID NO: 95 - DNA, 96 bp, Artificial Sequence
  BTN2A2 Signal peptide
atggaaccagctgctgctctgcacttctccctgccagcctccctcctcctcctcctgctcctcctccttctcagcctgtgtgcactggtctcagcc

SEQ ID NO: 96 - DNA, 51 bp, Artificial Sequence
  CD300A Signal peptide
atgtggctgccttgggctctgttgcttctctgggtcccaggatgttttgct

SEQ ID NO: 97 - DNA, 75 bp, Artificial Sequence
  NOTCH2 Signal peptide
atgcccgccctgcgccccgctctgctgtgggcgctgctggcgctctggctgtgctgcgcggcccccgcgcatgca

SEQ ID NO: 98 - DNA, 63 bp, Artificial Sequence
  STRC Signal peptide
atggctctcagcctctggcccctgctgctgctgctgctgctgctgctgctgctgtcctttgca

SEQ ID NO: 99 - DNA, 54 bp, Artificial Sequence
  AHSG Signal peptide
atgaagtccctcgtcctgctcctttgtcttgctcagctctggggctgccactca

SEQ ID NO: 100 - DNA, 63 bp, Artificial Sequence
  Syn1 Signal peptide
atgaagttcgccctggtggccgccctggccctgctgctgttcctgtggagcagctgcagggcc

SEQ ID NO: 101 - DNA, 60 bp, Artificial Sequence
  Syn2 Signal peptide
atgaagttcgccctggtggccgccctggccctgctgctgttcctgtggggctgccacagc

SEQ ID NO: 102 - DNA, 63 bp, Artificial Sequence
  Syn3 Signal peptide
atgaagtgggtgaccctgctgaccctgctgctgctgctgctgttcctgtggggctgccacagc

SEQ ID NO: 103 - DNA, 66 bp, Artificial Sequence
  Syn4 Signal peptide
atgaagtgggtgaccctgctgaccctgctgctgctgctgctgttcctgtggagcagctgcagggcc

SEQ ID NO: 104 - DNA, 1503 bp, Artificial Sequence
  SERPING1-WT
atggcctccaggctgaccctgctgaccctcctgctgctgctgctggctggggatagagcctcctcaaatccaaatgctaccagctccagctcccaggatccagagagtttgcaagacagaggcgaagggaaggtcgcaacaacagttatctccaagatgctattcgttgaacccatcctggaggtttccagcttgccgacaaccaactcaacaaccaattcagccaccaaaataacagctaataccactgatgaacccaccacacaacccaccacagagcccaccacccaacccaccatccaacccacccaaccaactacccagctcccaacagattctcctacccagcccactactgggtccttctgcccaggacctgttactctctgctctgacttggagagtcattcaacagaggccgtgttgggggatgctttggtagatttctccctgaagctctaccacgccttctcagcaatgaagaaggtggagaccaacatggccttttccccattcagcatcgccagcctccttacccaggtcctgctcggggctggggagaacaccaaaacaaacctggagagcatcctctcttaccccaaggacttcacctgtgtccaccaggccctgaagggcttcacgaccaaaggtgtcacctcagtctctcagattttccacagcccagacctggccataagggacacctttgtgaatgcctctcggaccctgtacagcagcagccccagagtcctaagcaacaacagtgacgccaacttggagctcatcaacacctgggtggccaagaacaccaacaacaagatcagccggctgctagacagtctgccctccgatacccgccttgtcctcctcaatgctatctacctgagtgccaagtggaagacaacatttgatcccaagaaaaccagaatggaaccctttcacttcaaaaactcagttataaaagtgcccatgatgaatagcaagaagtaccctgtggcccatttcattgaccaaactttgaaagccaaggtggggcagctgcagctctcccacaatctgagtttggtgatcctggtaccccagaacctgaaacatcgtcttgaagacatggaacaggctctcagcccttctgttttcaaggccatcatggagaaactggagatgtccaagttccagcccactctcctaacactaccccgcatcaaagtgacgaccagccaggatatgctctcaatcatggagaaattggaattcttcgatttttcttatgaccttaacctgtgtgggctgacagaggaccctgatcttcaggtttctgcgatgcagcaccagacagtgctggaactgacagagactggggtggaggcggctgcagcctccgccatctctgtggcccgcaccctgctggtctttgaagtgcagcagcccttcctcttcgtgctctgggaccagcagcacaagttccctgtcttcatggggcgagtatatgaccccagggcctga

SEQ ID NO: 105 - DNA, 1503 bp, Artificial Sequence
  SERPING1_coI2
atggctagcagactgactctgctgaccctgctgctgctgctgctggctggggacagggccagcagcaaccctaatgctacctctagctctagccaggaccctgagagcctgcaggataggggggagggcaaggtggccaccactgtgatcagcaagatgctgtttgtggagcctatcctggaggtgagcagcctgcccaccaccaactctactaccaactctgctaccaagatcactgccaataccactgatgaacccaccactcagcccactactgagcccaccacccagcccaccattcagcccactcagcccactacccagctgcctactgactctcccacccagcccaccactggcagcttttgtcctggccctgtgaccctgtgctctgacctggagagccattctactgaggctgtgctgggggatgccctggtggacttcagcctgaagctgtaccatgccttctctgccatgaagaaggtggagaccaacatggccttcagccccttctctattgcctctctgctgacccaggtgctgctgggggctggggagaatactaagaccaacctggagagcattctgagctatcccaaggacttcacctgtgtgcaccaggccctgaaggggttcactactaaaggggtgacctctgtgtctcagatcttccacagccctgacctggccatcagggacacttttgtgaatgccagcaggaccctgtacagcagcagccccagagtgctgagcaataattctgatgctaatctggagctgattaacacttgggtggccaagaacaccaacaacaagatctctaggctgctggattctctgccctctgacaccaggctggtgctgctgaatgccatctatctgtctgccaagtggaagaccacctttgatcccaagaagaccaggatggagcccttccatttcaagaactctgtgattaaagtgcccatgatgaactctaagaagtatcctgtggcccacttcattgatcagactctgaaggccaaggtggggcagctgcagctgagccacaacctgagcctggtgatcctggtgccccagaatctgaagcacaggctggaggacatggagcaggccctgagcccctctgtgttcaaggccatcatggagaagctggagatgagcaagttccagcccaccctgctgactctgcccagaattaaggtgaccaccagccaggacatgctgagcatcatggagaagctggagttctttgacttctcttatgacctgaacctgtgtggcctgactgaggatcctgacctgcaggtgtctgccatgcagcaccagactgtgctggagctgactgagactggggtggaggctgctgctgcctctgccatttctgtggccaggaccctgctggtgtttgaggtgcagcagcccttcctgtttgtgctgtgggaccagcagcacaagtttcctgtgtttatgggcagggtgtatgaccctagggcctga

SEQ ID NO: 106 - DNA, 1503 bp, Artificial Sequence
  SERPING1_coI3
atggccagcaggctgaccctgctgactctgctgctgctgctgctggctggggacagggccagcagcaaccctaatgccacctccagcagcagccaggaccctgagagcctgcaggataggggggagggcaaggtggctactactgtgatcagcaagatgctgtttgtggagcctatcctggaggtgagcagcctgcccaccactaactctactactaattctgccactaagatcactgccaataccactgatgagccaaccactcagcccaccactgagcccaccacccagcccaccattcagcccactcagcctaccacccagctgcctactgacagccccactcagcccactactggctctttctgtcctgggcctgtgactctgtgctctgacctggaatcccacagcactgaggctgtgctgggggatgccctggtggatttcagcctgaagctgtaccatgctttctctgccatgaagaaggtggagaccaacatggccttcagccctttctctattgccagcctgctgactcaggtgctgctgggggctggggagaataccaagaccaacctggagtctatcctgagctatcccaaggacttcacttgtgtgcaccaggccctgaaggggttcaccaccaagggggtgacctctgtgtctcagatctttcacagccctgacctggccatcagggatacctttgtgaatgccagcaggaccctgtacagcagcagccccagggtgctgagcaacaactctgatgccaacctggagctgatcaacacctgggtggccaagaacaccaacaacaagatcagcaggctgctggacagcctgccctctgataccaggctggtgctgctgaatgccatctacctgtctgctaagtggaagaccacttttgatcctaagaagaccaggatggagccctttcacttcaagaactctgtgatcaaggtgcccatgatgaactctaagaaataccctgtggcccacttcattgatcagaccctgaaggccaaggtgggccagctgcagctgagccacaacctgagcttggtgatcctggtgcctcagaacctgaagcacaggctggaggacatggagcaggccctgagcccctctgtgttcaaggccattatggagaagctggagatgagcaagttccagcctaccctgctgaccctgcccaggatcaaggtgactactagccaggatatgctgagcatcatggagaagctggagttttttgatttcagctatgacctgaacctgtgtggcctgactgaggaccctgacctgcaggtgtctgccatgcagcatcagactgtgctggagctgactgagactggggtggaggctgctgctgcctctgccatctctgtggccaggaccctgctggtgtttgaggtgcagcagcctttcctgtttgtgctgtgggatcagcagcacaagtttcctgtgttcatgggcagggtgtatgaccccagggcttga

SEQ ID NO: 107 - DNA, 1503 bp, Artificial Sequence
  SERPING1_coI4
atggctagcagactgactctgctgaccctgctgctgctgctgctggctggggacagggccagcagcaaccctaatgctacctctagctctagccaggaccctgagagcctgcaggataggggggagggcaaggtggccaccactgtgatcagcaagatgctgtttgtggagcctatcctggaggtgagcagcctgcccaccaccaactctactaccaactctgctaccaagatcactgccaataccactgatgaacccaccactcagcccactactgagcccaccacccagcccaccattcagcccactcagcccactacccagctgcctactgactctcccacccagcccaccactgggagcttctgtccaggccctgtgactctgtgttctgacctggagagccacagcactgaagctgtgctgggggatgctctggtggacttcagcctgaagctgtaccatgccttctctgccatgaagaaggtggaaaccaacatggcctttagccccttcagcattgctagcctgctgactcaggtgctgctgggggctggggagaacactaagactaacctggagtctatcctgtcttatcccaaggacttcacctgtgtgcatcaggccctgaaggggttcaccaccaagggggtcacctctgtgagccagatctttcacagccctgatctggccatcagggacacctttgtgaatgcctctaggactctgtacagcagcagccccagggtgctgagcaacaactctgatgccaacctggagctgatcaacacctgggtggccaagaacactaacaacaagatcagcaggctgctggacagcctgccctctgacactaggctggtgctgctgaatgccatctatctgtctgccaagtggaagaccacctttgaccccaagaagactaggatggagccctttcattttaagaactctgtgatcaaggtgcccatgatgaacagcaagaaataccctgtggcccatttcattgaccagactctgaaggctaaggtgggccagctgcagctgagccacaacctgagcctggtgatcctggtgccacagaatctgaagcacaggctggaggacatggagcaggctctgtctccctctgtgttcaaggccatcatggagaagctggagatgtctaagttccagcccaccctgctgaccctgcccaggatcaaggtgaccacttctcaggacatgctgtctatcatggagaagctggagttttttgacttttcttatgacctgaacctgtgtggcctgactgaggaccctgatctgcaggtgtctgccatgcagcaccagactgtgctggagctgactgagactggggtggaggctgctgctgcttctgccatttctgtggctaggactctgctggtgtttgaggtgcagcagcccttcctgtttgtgctgtgggaccagcagcacaagttccctgtgttcatgggcagggtgtatgatcccagggcttga

SEQ ID NO: 108 - DNA, 1503 bp, Artificial Sequence
  SERPING1_coI5
atggctagcagactgactctgctgaccctgctgctgctgctgctggctggggacagggccagcagcaaccctaatgctacctctagctctagccaggaccctgagagcctgcaggataggggggagggcaaggtggccaccactgtgatcagcaagatgctgtttgtggagcctatcctggaggtgagcagcctgcccaccaccaactctactaccaactctgctaccaagatcactgccaataccactgatgaacccaccactcagcccactactgagcccaccacccagcccaccattcagcccactcagcccactacccagctgcctactgactctcccacccagcccaccactggcagcttctgccctgggcctgtgaccctgtgctctgacctggagagccacagcactgaggctgtgctgggggatgccctggtggacttcagcctgaagctgtaccatgccttctctgccatgaagaaggtggagaccaatatggccttcagccccttcagcattgcctctctgctgacccaggtgctgctgggggctggggagaacactaagactaacctggagtctatcctgagctaccccaaggacttcacctgtgtgcaccaggccctgaagggcttcactaccaagggggtcacctctgtgagccagatcttccatagccctgacctggccatcagggacacctttgtgaatgcctctagaaccctgtactcttcttctcccagggtgctgagcaacaattctgatgccaacctggagctgatcaacacctgggtggctaagaacactaacaacaagatcagcaggctgctggacagcctgccttctgacaccaggctggtgctgctgaatgccatctatctgtctgccaagtggaagaccacttttgaccccaagaagaccaggatggagcccttccatttcaagaactctgtgatcaaggtccccatgatgaattctaagaagtaccctgtggctcatttcattgatcagaccctgaaggccaaggtgggccagctgcagctgagccacaatctgagcctggtgatcctggtgcctcagaacctgaagcacaggctggaagacatggagcaggccctgagcccctctgtgtttaaggccatcatggagaagctggagatgtctaagttccagcccaccctgctgaccctgcccaggatcaaggtgaccaccagccaggacatgctgagcatcatggagaagctggagttctttgatttcagctatgacctgaatctgtgtggcctgactgaggaccctgatctgcaggtgtctgccatgcagcaccagactgtgctggaactgactgagactggggtggaagctgctgctgcctctgccatctctgtggccaggaccctgctggtgtttgaggtgcagcagcccttcctgtttgtgctgtgggaccagcagcacaagttccctgtgtttatgggcagggtgtatgaccccagggcctga

SEQ ID NO: 109 - DNA, 1503 bp, Artificial Sequence
  SERPING1_coI6
atggctagcagactgactctgctgaccctgctgctgctgctgctggctggggacagggccagcagcaaccctaatgctacctctagctctagccaggaccctgagagcctgcaggataggggggagggcaaggtggccaccactgtgatcagcaagatgctgtttgtggagcctatcctggaggtgagcagcctgcccaccaccaactctactaccaactctgctaccaagatcactgccaataccactgatgaacccaccactcagcccactactgagcccaccacccagcccaccattcagcccactcagcccactacccagctgcctactgactctcccacccagcccaccactggctctttctgccctgggcctgtgactctgtgctctgacctggagagccactctactgaggctgtgctgggggatgccctggtggattttagcctgaagctgtatcatgccttctctgccatgaagaaggtggagaccaacatggccttcagccctttcagcattgccagcctgttgactcaggtgctgctgggggctggggagaacaccaagaccaatctggagagcatcctgagctatcccaaggacttcacctgtgtgcaccaggccctgaagggcttcaccactaagggggtgacctctgtgagccagattttccacagccctgacctggccattagggacacctttgtgaatgcttctaggaccctgtactctagctctcccagggtgctgagcaacaattctgatgccaacctggagctgatcaatacttgggtggccaagaacaccaacaacaagatctctaggctgctggacagcctgccctctgacaccaggctggtgctgctgaatgccatctacctgtctgccaagtggaagaccacttttgaccctaagaagactaggatggagcccttccactttaagaactctgtgattaaggtgcctatgatgaatagcaagaagtaccctgtggcccactttattgatcagaccctgaaggctaaggtgggccagttgcagctgtctcacaacctgagcctggtgattctggtgccccagaacctgaagcataggctggaggacatggagcaggccctgagcccttctgtgttcaaggccatcatggagaagctggagatgagcaagttccagcccaccctgctgaccctgcccaggatcaaggtgactactagccaggacatgctgtctatcatggagaagctggagttctttgatttctcttatgacctgaacctgtgtggcctgactgaggacccagacctgcaggtgtctgccatgcagcatcagactgtgctggagctgactgagactggggtggaggctgctgctgcctctgccatctctgtggccaggactttgctggtgtttgaggtgcagcagcctttcctgtttgtgctgtgggatcagcagcacaagttccctgtgttcatggggagggtgtatgaccccagggcctga

SEQ ID NO: 110 - DNA, 1503 bp, Artificial Sequence
  SERPING1_coI7
atggctagcagactgactctgctgaccctgctgctgctgctgctggctggggacagggccagcagcaaccctaatgctacctctagctctagccaggaccctgagagcctgcaggataggggggagggcaaggtggccaccactgtgatcagcaagatgctgtttgtggagcctatcctggaggtgagcagcctgcccaccaccaactctactaccaactctgctaccaagatcactgccaataccactgatgaacccaccactcagcccactactgagcccaccacccagcccaccattcagcccactcagcccactacccagctgcctactgactctcccacccagcccaccactggcagcttctgccctgggcctgtgaccctgtgctctgacctggagagccattctactgaggctgtgctgggggatgccctggtggatttcagcctgaagctgtaccatgccttctctgccatgaagaaggtggagaccaacatggccttctctcccttcagcattgccagcctgctgacccaggtgctgctgggggctggggagaacaccaagaccaacctggagagcatcctgtcttaccccaaggacttcacctgtgtgcatcaggccctgaagggcttcactactaagggggtgacctctgtgtctcagattttccacagccctgacctggctattagggacacttttgtgaatgcttctaggaccctgtacagcagctctcccagggtgctgagcaacaactctgatgccaacctggagctgattaacacttgggtggccaagaacactaacaataagatcagcaggctgctggacagcctgccctctgacaccaggctggtgctgctgaatgccatctacctgtctgccaagtggaagactacttttgatcctaagaagaccaggatggagcctttccacttcaagaactctgtgatcaaggtgcccatgatgaattctaagaagtaccctgtggctcacttcattgaccagaccctgaaggccaaggtgggccagctgcagctgagccacaacctgagcctggtgattctggtgccccagaacctgaagcacaggctggaggacatggagcaggccctgagcccctctgtgttcaaggccatcatggagaagctggagatgagcaagttccagcctactctgctgactctgcccaggatcaaggtgaccactagccaggacatgctgagcattatggagaagctggagttctttgacttttcttatgatctgaacctgtgtggcctgactgaggaccctgacctgcaggtgtctgccatgcagcaccagactgtgctggagctgactgagactggggtggaggctgctgctgcctctgccatctctgtggctaggaccctgctggtgtttgaggtgcagcagcccttcctgtttgtgctgtgggaccagcagcacaagttccctgtcttcatgggcagggtgtatgatcccagggcttga

SEQ ID NO: 111 - DNA, 1503 bp, Artificial Sequence
  SERPING1_coI8
atggctagcagactgactctgctgaccctgctgctgctgctgctggctggggacagggccagcagcaaccctaatgctacctctagctctagccaggaccctgagagcctgcaggataggggggagggcaaggtggccaccactgtgatcagcaagatgctgtttgtggagcctatcctggaggtgagcagcctgcccaccaccaactctactaccaactctgctaccaagatcactgccaataccactgatgaacccaccactcagcccactactgagcccaccacccagcccaccattcagcccactcagcccactacccagctgcctactgactctcccacccagcccaccactggcagcttttgccctggccctgtgaccctgtgctctgacctggagagccacagcactgaggctgtgttgggggatgccctggtggatttcagcctgaagctgtaccatgccttctctgctatgaagaaggtggagaccaacatggctttcagccccttcagcattgccagcctgctgacccaggtgctgctgggggctggggagaacaccaagaccaacctggagagcattctgtcttaccccaaggacttcacctgtgtgcaccaggccctgaaggggttcactaccaagggggtgacctctgtgtctcagatctttcacagccctgatctggccattagggacacttttgtgaatgctagcaggaccctgtacagctcttctcccagggtgctgagcaataactctgatgccaatctggagctgatcaatacttgggtggccaagaacaccaacaataagatctctaggctgctggacagcctgccttctgacaccaggctggtgctgctgaatgccatctatctgtctgccaagtggaagaccacctttgaccccaagaagaccaggatggagcccttccactttaagaactctgtcatcaaggtgcccatgatgaattctaagaagtaccctgtggcccacttcattgatcagaccctgaaggccaaggtggggcagctgcagctgagccacaatctgtctctggtgatcctggtgccccagaatctgaagcataggctggaagacatggagcaggccctgagcccctctgtgttcaaggccattatggagaagctggagatgagcaagttccagcctaccctgctgaccctgccaaggatcaaggtgaccaccagccaggacatgctgagcatcatggagaagctggagttctttgacttttcttatgacctgaacctgtgtggcctgactgaggatccagacctgcaggtgtctgccatgcagcaccagactgtgctggagctgactgagactggggtggaggctgctgctgcctctgctatctctgtggccaggactctgctggtgtttgaggtgcagcagccctttctgtttgtgctgtgggaccagcagcacaagtttcctgtgttcatgggcagggtgtatgaccccagggcctga

SEQ ID NO: 112 - DNA, 1503 bp, Artificial Sequence
  SERPING1_coI11
atggctagcagactgactctgctgaccctgctgctgctgctgctggctggggacagggccagcagcaaccctaatgctacctctagctctagccaggaccctgagagcctgcaggataggggggagggcaaggtggccaccactgtgatcagcaagatgctgtttgtggagcctatcctggaggtgagcagcctgcccaccaccaactctactaccaactctgctaccaagatcactgccaataccactgatgaacccaccactcagcccactactgagcccaccacccagcccaccattcagcccactcagcccactacccagctgcctactgactctcccacccagcccaccactggctctttctgcccaggccctgtgaccctgtgctctgacctggagagccactctactgaggctgtcctgggggatgctctggtggatttcagcctgaagctgtatcatgccttctctgctatgaagaaggtggagaccaacatggccttcagccccttcagcattgccagcctgctgacccaggtgctgctgggggctggggagaatactaagactaacctggagagcatcctgagctaccccaaggactttacctgtgtgcatcaggccctgaagggcttcaccaccaagggggtgacctctgtgagccagatctttcactctcctgacctggccatcagggatacctttgtgaatgccagcaggaccctgtacagctctagccctagggtgctgagcaacaattctgatgccaatctggagctgatcaatacctgggtggccaaaaacaccaacaacaagatcagcaggctgctggattctctgccctctgataccaggctggtgctgctgaatgctatttacctgtctgctaagtggaagaccacctttgaccccaagaagactaggatggagcctttccacttcaagaactctgtgatcaaggtgcccatgatgaactctaagaagtaccctgtggcccatttcattgaccagaccctgaaggccaaggtgggccagctgcagctgagccacaatctgagcctggtgatcctggtgccccagaacctgaagcataggctggaggatatggagcaggccctgagcccttctgtgtttaaggccattatggagaagctggagatgtctaagtttcagcccactctgctgactctgcccaggattaaggtgaccaccagccaggacatgctgagcatcatggagaagctggagttctttgacttctcttatgacctgaatctgtgtggcctgactgaggacccagacctgcaggtgtctgctatgcagcaccagactgtgctggagctgactgagactggggtggaggctgctgctgcttctgccatctctgtggccaggaccctgctggtgtttgaggtgcagcagcccttcctgtttgtgctgtgggaccagcagcacaaattccctgtgttcatgggcagggtgtatgaccccagggcctga

SEQ ID NO: 113 - DNA, 1503 bp, Artificial Sequence
  SERPING1_coI12
atggctagcagactgactctgctgaccctgctgctgctgctgctggctggggacagggccagcagcaaccctaatgctacctctagctctagccaggaccctgagagcctgcaggataggggggagggcaaggtggccaccactgtgatcagcaagatgctgtttgtggagcctatcctggaggtgagcagcctgcccaccaccaactctactaccaactctgctaccaagatcactgccaataccactgatgaacccaccactcagcccactactgagcccaccacccagcccaccattcagcccactcagcccactacccagctgcctactgactctcccacccagcccaccactgggagcttctgccctgggcctgtgaccctgtgttctgatctggagtctcacagcactgaggctgtgctgggggatgccctggtggactttagcctgaagctgtaccatgccttctctgccatgaagaaggtggagaccaacatggccttcagccccttcagcattgccagcctgctgacccaggtcctgctgggggctggggagaataccaagaccaacctggagtctatcctgagctatcctaaggactttacctgtgtgcaccaggccctgaaggggttcaccaccaagggggtgacctctgtgtctcagatcttccattctcctgacctggccatcagggatacctttgtgaatgctagcagaactctgtatagcagcagccctagggtgctgagcaataactctgatgctaacctggagctgatcaacacctgggtggctaagaacaccaataacaagatcagcagactgctggacagcctgccctctgacactaggctggtgctgctgaatgccatctacctgtctgccaagtggaagaccacctttgatcccaagaagactaggatggagcccttccacttcaagaattctgtgatcaaggtgcccatgatgaacagcaagaagtaccctgtggcccacttcattgatcagaccctgaaggccaaggtgggccagctgcagctgtctcacaacctgagcctggtcatcctggtgccccagaacctgaagcatagactggaggacatggagcaggctctgagcccctctgtgttcaaggccattatggagaagctggagatgtctaagttccagcctactctgctgaccctgcccaggattaaggtgaccacttctcaggatatgctgagcatcatggagaagctggagttttttgactttagctatgacctgaacctgtgtggcctgactgaggatcctgatctgcaggtgtctgccatgcagcaccagactgtgctggagctgactgagactggggtggaggctgctgctgcttctgccatctctgtggccaggaccttgctggtgtttgaggtgcagcagcccttcctgtttgtgctgtgggatcagcagcacaagttccctgtgttcatgggcagggtgtatgaccccagggcctga

SEQ ID NO: 114 - DNA, 1503 bp, Artificial Sequence
  SERPING1_coI13
atggctagcagactgactctgctgaccctgctgctgctgctgctggctggggacagggccagcagcaaccctaatgctacctctagctctagccaggaccctgagagcctgcaggataggggggagggcaaggtggccaccactgtgatcagcaagatgctgtttgtggagcctatcctggaggtgagcagcctgcccaccaccaactctactaccaactctgctaccaagatcactgccaataccactgatgaacccaccactcagcccactactgagcccaccacccagcccaccattcagcccactcagcccactacccagctgcctactgactctcccacccagcccaccactggcagcttctgccctggccctgtgaccctgtgctctgacctggagagccacagcactgaggctgtgctgggggatgccctggtggatttcagcctgaagctgtaccatgccttctctgccatgaagaaggtggagaccaacatggccttcagccccttcagcattgctagcctgctgactcaggtgctgctgggggctggggagaataccaagaccaacctggagagcatcctgagctatcctaaggacttcacctgtgtgcaccaggccttgaaggggttcaccaccaagggggtgacttctgtgagccagattttccacagccctgatctggctattagggacacctttgtgaatgccagcaggaccctgtacagctctagccccagggtgctgagcaacaactctgatgctaacctggaactgatcaacacttgggtggctaagaacactaataataagattagcagactgctggacagcctgccctctgacaccaggctggtgctgctgaatgccatctacctgtctgccaagtggaagaccacctttgatcccaagaagaccaggatggaacccttccacttcaagaattctgtgattaaggtgcccatgatgaattctaagaagtaccctgtggcccacttcattgatcagaccctgaaggccaaggtgggccagctgcagctgtctcataatctgtctctggtgatcctggtgccccagaacctgaagcataggctggaggatatggagcaggccctgagcccctctgtcttcaaggctatcatggagaagctggagatgagcaagttccagcccaccctgctgaccctgcctagaatcaaggtgactacttctcaggacatgctgagcatcatggagaagctggagttctttgacttcagctatgacctgaacctgtgtggcctgactgaggaccctgacctgcaggtgtctgccatgcagcatcagactgtgctggagctgactgagactggggtggaggctgctgctgcctctgctatttctgtggccaggaccctgctggtgtttgaggtgcagcagcccttcctgtttgtgctgtgggaccagcagcacaagttccctgtgtttatgggcagggtgtatgaccccagggcctga

SEQ ID NO: 115 - DNA, 1503 bp, Artificial Sequence
  SERPING1_coI17
atggcctctaggctgaccctgctgactctgctgctcctgctgctggctggggacagggcctctagcaaccccaatgctactagcagcagcagccaggaccctgaatctctgcaggacaggggggagggcaaggtggccactactgtgatctctaagatgctgtttgtggagcccatcctggaggtgagcagcctgcccaccactaacagcaccactaactctgccaccaagatcactgccaacactactgatgagcccactactcagcccaccactgagcccactacccagcccactatccagcccactcagcccactacccagctgcccactgacagccccacccagcccactactggcagcttttgccctggccctgtgaccctgtgctctgacctggagagccactctactgaggctgtgctgggggatgccctggtggacttttctctgaagctgtaccatgccttttctgccatgaagaaggtggagactaatatggccttcagccccttctctattgccagcctgctgactcaggtgctgctgggggctggggagaacactaagaccaatctggagagcattctgagctaccccaaggacttcacctgtgtgcaccaggccctgaagggcttcaccactaagggggtgacctctgtgagccagatcttccacagccctgacctggctatcagggatacttttgtgaatgccagcaggactctgtacagcagcagccccagggtgctgtctaacaactctgatgctaacctggaactgatcaacacttgggtggccaagaacaccaacaacaagatcagcaggctgctggatagcctgccctctgacaccagactggtgctgctgaatgctatctatctgtctgccaagtggaagaccacctttgaccccaagaagaccagaatggagcccttccatttcaagaattctgtgattaaggtgcccatgatgaacagcaagaagtaccctgtggcccacttcattgatcagaccctgaaggctaaggtgggccagctgcagctgagccataatctgagcctggtgatcctggtgcctcagaatctgaagcacaggctggaggacatggaacaggccctgagcccctctgtgttcaaggctatcatggaaaagctggagatgagcaagttccagcccactctgctgaccctgcccagaattaaggtgactacctctcaggatatgctgagcatcatggagaagctggagttttttgacttcagctatgatttgaatctgtgtggcctgactgaggatcctgatctgcaggtgtctgccatgcagcaccagactgtgctggagctgactgagactggggtggaggctgctgctgcctctgccatttctgtggctaggaccctgctggtgtttgaggtgcagcagcccttcctgtttgtcctgtgggaccagcagcacaagttccctgtgtttatgggcagagtgtatgaccctagggcctga

SEQ ID NO: 116 - DNA, 1503 bp, Artificial Sequence
  SERPING1_coI18
atggctagcaggctgaccctgctgaccctgctcctgctgctgctggctggggatagggccagctctaaccccaatgccactagcagcagcagccaggaccctgagtctctgcaggataggggggagggcaaggtggccaccactgtgattagcaagatgctgtttgtggagcctattctggaggtgagcagcctgcccaccactaacagcaccaccaactctgccaccaagatcactgccaacactactgatgagcctaccactcagcccactactgagcctaccacccagcctactatccagcccacccagcccaccacccagctgcccactgatagccccactcagcctaccactggcagcttttgccctggccctgtgaccctgtgctctgacctggagagccatagcactgaggctgtgctgggggatgccctggtggacttcagcctgaagctgtaccatgccttctctgccatgaaaaaggtggagactaacatggctttcagccccttcagcattgcctctctgctgacccaggtgctgctgggggctggggagaacaccaagaccaacctggagagcattctgagctatcccaaagacttcacttgtgtgcatcaggctctgaagggctttaccaccaagggggtgacctctgtgagccagatcttccatagccctgacctggccatcagggatacctttgtgaatgctagcaggaccctgtacagcagcagccccagggtgttgtctaacaactctgatgctaatctggagctgattaatacttgggtggccaagaacaccaacaataagatctctaggctgctggatagcctgccttctgacaccaggctggtgctgctgaatgccatctatctgtctgccaagtggaagaccacttttgatcccaagaagaccaggatggagccctttcattttaagaactctgtgatcaaggtgcccatgatgaactctaagaagtaccctgtggctcacttcattgaccagaccctgaaggctaaggtgggccagctgcagctgtctcacaatctgtctctggtgatcctggtccctcagaacctgaagcacaggctggaggacatggagcaggctctgagcccctctgtcttcaaggctatcatggagaagctggagatgagcaagttccagcctaccctgctgaccctgcccaggatcaaggtgaccacttctcaggacatgctgagcattatggagaagctggagttctttgacttcagctatgacctgaatctgtgtgggctgactgaggaccctgacctgcaggtgtctgccatgcagcatcagactgtgctggagctgactgagactggggtggaggctgctgctgcctctgccatctctgtggccaggactctgctggtgtttgaggtgcagcagccttttctgtttgtgctgtgggaccagcagcataagttcccagtgttcatgggcagggtgtatgatcccagggcctga

SEQ ID NO: 117 - DNA, 1503 bp, Artificial Sequence
  SERPING1_coI19
atggccagcaggttgaccctgctgaccctgctgctcctgctgctggctggggatagggccagcagcaatcccaatgctactagcagcagcagccaggaccctgagagcctgcaggacaggggggagggcaaggtggccaccactgtgatcagcaagatgctgtttgtggagcccatcctggaggtgagcagcctgcccactaccaactctaccaccaactctgctactaagatcactgctaatactactgatgagcccaccactcagcccaccactgagcccaccacccagcccactatccagcccacccagcccaccacccagctgcccactgacagccccactcagcctaccactggctctttctgccctggccctgtgaccctgtgttctgatctggagagccatagcactgaggctgtgctgggggatgctctggtggacttcagcctgaagctgtaccatgccttctctgccatgaagaaggtggagactaacatggcctttagccccttttctattgccagcctgctgactcaggtgctgctgggggctggggagaataccaagaccaacctggagagcatcctgagctaccccaaggacttcacctgtgtgcatcaggctctgaagggcttcactactaagggggtgacctctgtgagccagatcttccacagccctgacctggccattagggacacctttgtcaatgccagcaggactctgtattctagcagccccagggtgctgagcaacaactctgatgccaacctggagctgatcaacacctgggtggccaagaacactaacaacaagattagcaggctgctggacagcctgccctctgacactaggttggtgctgctgaatgccatctacctgtctgccaagtggaagaccacctttgatcccaagaagactaggatggagcctttccacttcaagaactctgtgatcaaggtgcccatgatgaactctaagaagtatcctgtggcccacttcattgaccagaccctgaaggccaaggtggggcagctgcagctgtctcacaacctgagcctggtgatcctggtcccccagaatctgaagcataggctggaggatatggagcaggccctgtctccctctgtgttcaaggccatcatggagaagctggagatgagcaagtttcagcccaccctgctgaccctgcccaggatcaaggtgactactagccaggacatgctgagcatcatggagaagctggagttttttgacttctcttatgatctgaacctgtgtggcctgactgaggaccctgacctgcaggtgtctgccatgcagcaccagactgtgctggagctgactgagactggggtggaggctgctgctgcctctgccatctctgtggccaggactctgctggtgtttgaggtgcagcagcccttcctgtttgtgctgtgggaccagcagcataagttccctgtgttcatggggagggtgtatgatcccagagcctga

SEQ ID NO: 118 - DNA, 1503 bp, Artificial Sequence
  SERPING1_coI20
atggccagcaggctgaccctgctgaccctgctgctgctcctgctggctggggatagggccagcagcaaccccaatgctactagcagcagcagccaggatcctgagagcctgcaggacagaggggaagggaaggtggccaccactgtgatcagcaagatgctgtttgtggagcctatcctggaggtgagctctctgcccaccactaacagcaccaccaattctgctactaagatcactgccaacaccactgatgagcccaccacccagcctaccactgagccaactacccagcccaccatccagcccacccagcccaccactcagctgcctactgattctcctactcagcctaccactgggagcttctgccctgggcctgtgaccctgtgctctgacctggagtctcattctactgaggctgtgctgggggatgccctggtggacttcagcctgaagctgtaccatgctttctctgccatgaagaaggtggagactaacatggccttctctcctttctctattgccagcctgctgactcaggtgctgctgggggctggggagaataccaagactaacctggagagcatcctgtcttatcctaaggacttcacttgtgtgcatcaggccctgaagggcttcaccaccaagggggtgacttctgtgagccagattttccacagccctgacctggccatcagagacacctttgtgaatgccagcaggaccctgtattctagctctcccagggtgctgagcaacaactctgatgccaatctggaactgatcaacacttgggtggccaagaacaccaacaacaagatcagcaggctgctggatagcctgccctctgacaccaggctggtgctgctgaatgccatctacctgtctgccaagtggaagaccacctttgaccccaagaagactaggatggagcccttccacttcaagaactctgtgatcaaggtgcccatgatgaatagcaagaagtaccctgtggcccacttcattgaccagaccctgaaggccaaggtggggcagctgcagctgagccacaacctgagcctggtgatcctggtgccccagaacctgaagcacagactggaggacatggagcaggccctgagcccatctgtgttcaaggctattatggagaagctggagatgtctaagtttcagcctaccctgctgaccctgcccaggatcaaggtgactaccagccaggacatgctgagcatcatggagaagctggaattctttgacttcagctatgatctgaatctgtgtggcctgactgaagaccctgatttgcaggtgtctgctatgcagcaccagactgtgctggaactgactgagactggggtggaggctgctgctgcctctgccatctctgtggccaggaccctgctggtgtttgaggtgcagcagcctttcctgtttgtgctgtgggatcagcagcacaagttccctgtgttcatgggcagggtgtatgaccctagggcttga

SEQ ID NO: 119 - DNA, 1503 bp, Artificial Sequence
  SERPING1_coI21
atggcctctaggctgactctgctgactctgctgctcctgctgctggctggggacagggccagctctaaccccaatgctacttctagctcctctcaggaccctgagagcctgcaggacaggggggagggcaaggtggccaccactgtgatctctaagatgctgtttgtggagcccatcctggaggtgagcagcctgcccaccaccaacagcaccaccaactctgccactaagatcactgccaacaccactgatgagcccaccacccagcccactactgagcccaccacccagcctactatccagcccacccagcccactacccagctgcccactgacagccctacccagcccaccactggcagcttctgccctgggcctgtgaccctgtgctctgacctggagagccattctactgaggctgtgctgggggatgccctggtggacttctctctgaagctgtaccatgctttctctgccatgaagaaggtggagactaacatggcttttagccccttcagcattgctagcctgctgacccaggtgctgctgggggctggggagaacactaagaccaacctggaatctatcctgagctaccccaaggacttcacctgtgtgcaccaggccctgaagggcttcaccaccaagggggtgacctctgtgagccagatcttccacagccctgacctggccatcagggatacttttgtgaatgccagcagaaccctgtactcttctagccccagggtgctgagcaataattctgatgctaacctggagctgatcaatacctgggtggctaagaataccaacaacaagattagcaggctgctggactctctgccttctgataccaggctggtgctgctgaatgccatttacctgtctgccaagtggaagaccacttttgaccctaagaagactaggatggagcctttccacttcaagaactctgtcattaaggtgcccatgatgaacagcaagaagtatcctgtggcccactttattgaccagactctgaaggccaaggtgggccagctgcagctgagccataacctgagcctggtgatcctggtgccccagaacctgaagcataggctggaggacatggagcaggctctgagcccctctgtgttcaaggctattatggagaagctggagatgagcaagttccagcccactctgctgaccctgcccagaatcaaggtgaccacctctcaggacatgctgagcatcatggaaaagctggagttctttgacttttcttatgacctgaatctgtgtggcctgactgaggatcctgatctgcaggtgtctgccatgcagcaccagactgtgctggagctgactgagactggggtggaggctgctgctgcttctgccatctctgtggccaggaccctgctggtgtttgaggtgcagcagcccttcctgtttgtgctgtgggaccagcagcacaagtttcctgtgttcatgggcagggtgtatgaccccagagcctga

SEQ ID NO: 120 - DNA, 1503 bp, Artificial Sequence
  SERPING1_coI22
atggcttctaggctgactctgctgaccctgctgctgctcctgctggctggggacagggcctcttctaatcccaatgccaccagcagcagctctcaggatcctgagagcctgcaggataggggggagggcaaggtggccactactgtgatcagcaagatgctgtttgtggagcccatcctggaggtgtcttctctgcccaccactaatagcaccactaattctgctaccaagatcactgccaataccactgatgagcccaccactcagcccactactgagcctactactcagcccactatccagcccacccagcccaccacccagctgcccactgactctcccacccagcccactactggcagcttctgccctgggccagtgactctgtgctctgacctggagtctcacagcactgaggctgtcctgggggatgccctggtggatttcagcttgaagctgtaccatgctttctctgccatgaagaaggtggagactaatatggcttttagccccttctctattgccagcctgctgacccaggtgctgctgggggctggggagaatactaagactaacctggagagcatcctgagctatcccaaggacttcacctgtgtgcaccaggccctgaagggcttcaccaccaagggggtgacctctgtgagccagatcttccacagccctgatctggctatcagggacacctttgtgaatgcctctaggactctgtacagcagctctcccagggtcctgtctaataactctgatgccaacctggagctgattaatacttgggtggccaagaataccaataataagatcagcaggctgctggacagcctgccctctgacactaggctggtgctgctgaatgctatttacctgtctgccaagtggaagaccacctttgaccccaagaagaccaggatggagcctttccacttcaagaattctgtgatcaaggtgcccatgatgaactctaagaagtaccctgtggcccacttcattgaccagactctgaaggctaaggtgggccagctgcagctgagccataatctgtctctggtgatcctggtgccacagaacctgaagcacaggctggaggacatggagcaggccctgagcccttctgtgtttaaggccatcatggagaagttggagatgagcaagttccagcccaccctgctgaccctgcccagaatcaaggtgactaccagccaggacatgctgagcatcatggagaagctggagttctttgacttcagctatgacctgaacctgtgtggcctgactgaggaccctgacctgcaggtgtctgccatgcagcaccagactgtgctggagctgactgagactggggtggaggctgctgctgcctctgccatctctgtggccaggaccctgctggtgtttgaggtgcagcagcctttcctgtttgtgctgtgggaccagcagcacaagtttcctgtgttcatgggcagagtctatgatcccagagcttga

SEQ ID NO: 121 - DNA, 1503 bp, Artificial Sequence
  SERPING1_coI23
atggccagcaggctgactctgctgaccctgctcctgctgctgctggctggggacagggccagctctaaccccaatgccacctctagctctagccaggaccctgagagcctgcaggacaggggggagggcaaggtggccaccactgtgatcagcaagatgctgtttgtggagcccattctggaggtgagcagcctgcccaccaccaacagcaccaccaactctgccaccaagatcactgccaataccactgatgagcccaccactcagcctaccactgagcccaccacccagcctaccatccagcccacccagcccactacccagctgcctactgactctcccactcagcccactactggcagcttctgtccagggcctgtcactctgtgttctgatctggagagccacagcactgaggctgtgctgggggatgctctggtggatttctctctgaagctgtaccatgccttctctgccatgaagaaggtggagactaacatggctttcagccccttctctattgcctctctgctgactcaggtcctgctgggggctggggaaaataccaagactaatctggagtctatcctgagctatcccaaggacttcacctgtgtgcaccaggctctgaagggcttcaccaccaagggggtgacctctgtgtctcagatcttccatagccctgacctggccattagggacacctttgtgaatgcctctaggaccctgtacagcagcagccctagggtgctgagcaacaactctgatgccaatctggagctgattaacacctgggtggccaagaataccaacaacaagatcagcaggctgctggatagcctgccttctgataccaggctggtgctgttgaatgccatctatctgtctgccaagtggaagactacctttgaccctaagaagaccaggatggagcccttccatttcaagaattctgtgatcaaggtgcccatgatgaatagcaagaaataccctgtggctcacttcattgaccagaccctgaaggctaaggtgggccagctgcagctgtctcataacctgagcctggtgatcctggtgccccagaacctgaagcataggctggaggacatggagcaggccctgagcccctctgtgtttaaggccatcatggagaagctggagatgagcaagttccagcccactctgctgactctgcccaggatcaaggtgaccaccagccaggacatgctgtctatcatggagaagctggagttttttgatttctcttatgacctgaatctgtgtgggctgactgaggaccctgacctgcaggtgtctgccatgcagcaccagactgtgctggagctgactgagactggggtggaggctgctgctgcctctgctatctctgtggccaggaccctgctggtgtttgaggtgcagcagcctttcctgtttgtgctgtgggaccagcagcataagttccctgtcttcatgggcagggtgtatgatcccagagcctga

SEQ ID NO: 122 - DNA, 1503 bp, Artificial Sequence
  SERPING1_coI24
atggctagcaggctgaccctgctgaccctgctgctcctgctgctggctggggacagggcctctagcaatcccaatgccacctctagctctagccaggatcctgagagcctgcaggacaggggggagggcaaggtggccaccactgtgatcagcaagatgctgtttgtggagcccattctggaggtgtcttctctgcccaccaccaatagcaccactaattctgccaccaagatcactgctaacaccactgatgagcccaccactcagcctaccactgagcccaccacccagcccactatccagcccacccagcccaccacccagctgcctactgacagccctacccagcccactactgggagcttctgccctggccctgtgaccctgtgctctgacctggagagccacagcactgaggctgtgctgggggatgccctggtggacttcagcctgaagctgtaccatgccttttctgccatgaagaaggtggagaccaacatggcctttagccctttcagcattgccagcctgctgactcaggtgctgctgggggctggggagaacaccaagaccaacctggagagcatcctgagctaccccaaggacttcacttgtgtgcaccaggccctgaagggcttcactaccaagggggtgacttctgtgagccagatcttccacagccctgacctggccatcagggatacttttgtgaatgccagcaggaccctgtacagcagcagccccagggtgctgagcaacaactctgatgctaacctggagctgatcaatacttgggtggccaagaacaccaacaacaagatttctaggctgctggactctctgccctctgacactaggctggtgctgctgaatgccatctacctgtctgccaagtggaagaccacctttgatcccaagaagactaggatggagcccttccacttcaagaactctgtgatcaaggtgcccatgatgaacagcaagaagtaccctgtggcccatttcattgaccagaccctgaaggccaaggtggggcagctgcagctgagccacaatctgagcctggtgattctggtgccccagaatctgaagcacagactggaggacatggagcaggctctgtctccctctgtgttcaaggccatcatggagaagctggagatgagcaagttccagcccactctgctgactctgcctaggatcaaggtgaccaccagccaggacatgctgagcattatggagaagctggagttctttgacttcagctatgacctgaacctgtgtggcctgactgaggaccctgatctgcaggtgtctgccatgcagcaccagactgtgctggagctgactgagactggggtggaggctgctgctgcctctgctatttctgtggccaggaccctgctggtgtttgaggtgcagcagcccttcctgtttgtgctgtgggaccagcagcacaagtttcctgtgttcatggggagggtgtatgaccccagggcctga

SEQ ID NO: 123 - DNA, 1503 bp, Artificial Sequence
  SERPING1_coH1
atggcctccaggctcaccctgctgaccctcctgctgcttctgcttgctggggatagagcctcctcaaatccaaatgccacatctagctcctcccaggatccagaaagcttgcaagacaggggagagggcaaggtggcaactactgtgatttccaagatgctgtttgtggagcccatcctggaggtttccagcttgcctacaaccaactctactaccaattcagccaccaaaattactgctaataccactgatgagccaacaacccagccaaccacagagcccaccacacagcccaccatccaacccacccaaccaactacccagctcccaactgactctcctacccagcctaccactggctccttctgccctggacctgttactctctgctctgacttggagagccattcaactgaggcagtcctgggggatgctttggtagatttcagcctgaagctttaccatgctttttcagctatgaagaaggtggagaccaacatggccttttccccattcagtatagcaagtctcctgactcaggtcctgctgggggcaggggagaatacaaagaccaacctggagagcatcctcagttatcccaaggacttcacctgtgtccaccaggccctgaagggcttcacaacaaagggggtgacctcagtctctcagattttccacagcccagacctggccataagggacacctttgtgaatgcctctaggaccctgtacagctccagtcccagagtcctaagcaacaacagtgatgcaaatttggagctcatcaacacctgggtggccaagaacaccaacaacaagatcagcaggctgctagacagtctgccaagtgatacaaggcttgtcctcctcaatgctatctacctgagtgccaagtggaagacaacatttgatcccaagaaaaccagaatggaaccctttcacttcaaaaactcagttataaaagtgcccatgatgaatagcaagaagtaccctgtggcccatttcattgaccaaactttgaaagccaaggtggggcagctgcagctctcccacaatctgagtctggtaatcctggtaccccagaacctgaaacataggcttgaagacatggaacaggctctcagcccttctgttttcaaggccataatggagaagctggagatgtccaagttccagcccactctcctaacactacccaggatcaaagtgacaaccagccaggatatgctctcaatcatggagaaattggaattttttgatttttcttatgaccttaacctgtgtgggctgacagaggaccctgatcttcaggtttctgcaatgcagcaccagacagtgctggaactgacagagactggggtggaagctgctgcagcaagtgcaatatctgtggccagaaccctgctggtctttgaagtgcagcagcccttcctgtttgtgctgtgggaccagcagcacaagttccctgtcttcatggggagggtatatgaccccagggcctga

SEQ ID NO: 124 - DNA, 1503 bp, Artificial Sequence
  SERPING1_coH2
atggcttccaggctcaccctgctgaccctcctgctgcttctgctggctggggacagggcctcctcaaatccaaatgctacctctagctcctcacaagatccagaaagccttcaagacaggggggagggcaaggtggcaactactgtgatttccaagatgctgtttgtggagcccatcctggaagtcagcagcttgcctacaaccaactcaacaaccaattctgccaccaaaattacagctaataccacagatgagcctacaacacaacccactactgagccaaccactcagcctactatccaacctacccaaccaactacccagctcccaacagattctcctactcagcccaccactggctccttctgcccaggacctgttactctctgctctgacttggaaagccattcaacagaggcagtgctgggggatgctttggtagatttctcccttaagctttaccatgccttttcagcaatgaagaaggtggagaccaacatggccttttccccattcagtatagcaagtctcctgactcaggtcctgctgggggcaggggagaatacaaagaccaacctggagagcatcctcagttatcccaaggacttcacctgtgtccaccaggccctgaagggcttcacaacaaagggggtgacctcagtctctcagattttccacagcccagacctggccataagggacacctttgtgaatgcctctaggaccctgtactccagttcccccagagtcctaagcaacaacagtgatgcaaatttggagctcatcaacacctgggtggccaagaacaccaacaacaagatcagcaggctgctagacagtctgccaagtgatacaaggcttgtcctcctcaatgctatctacctgagtgccaagtggaagacaacatttgatcccaagaaaaccagaatggaaccctttcacttcaaaaactcagttataaaagtgcccatgatgaatagcaagaagtaccctgtggcccatttcattgaccaaactttgaaagccaaggtggggcagctgcagctctcccacaatctgagtctggtaatcctggtaccccagaacctgaaacataggcttgaagacatggaacaggctctcagcccttctgttttcaaggccataatggagaagctggagatgtccaagttccagcccactctcctaacactacccaggatcaaagtgacaaccagccaggatatgctctcaatcatggagaaattggaattttttgatttttcttatgaccttaacctgtgtgggctgacagaggaccctgatcttcaggtttctgcaatgcagcaccagacagtgctggaactgacagagactggggtggaagctgctgcagcaagtgcaatatctgtggccagaaccctgctggtctttgaagtgcagcagcccttcctgtttgtgctgtgggaccagcagcacaagttccctgtcttcatggggagggtatatgaccccagggcctga

SEQ ID NO: 125 - DNA, 1503 bp, Artificial Sequence
  SERPING1_coH3
atggcctccaggctgaccctgctgaccctcctgctgttgctgctggctggggacagagcctcctctaatccaaatgctaccagctcctcctctcaggacccagagtcccttcaggacaggggggagggcaaggtggccacaactgtcatttccaagatgctgtttgtggagcccatcctggaggtttccagcctgcctactaccaactccactaccaattcagccaccaagattacagccaacaccacagatgagccaactactcagcccactacagagcctaccacccagcctaccatccaacccacccaacccactacccagctccccacagattcccctacccagcccaccactggctccttctgcccaggacctgttactctctgctctgacttggagtctcatagcacagaggctgtgctgggggatgccttggtggacttctccctgaagctctaccatgctttctctgctatgaagaaggtggagaccaacatggccttctccccattctccatagcaagtctcctgactcaggtcctgctgggggcaggggagaacacaaaaacaaacctggagagcatcctcagttaccccaaggacttcacctgtgtccaccaggccctgaagggcttcaccacaaagggggtgacctcagtgtcccagattttccacagccctgacctggccatcagggacacctttgtgaatgcctccaggaccctgtactccagctcaccaagggtgctgagcaacaacagtgatgcaaatctggagctcatcaacacctgggtggccaagaacaccaacaacaagatcagcaggctgctagacagtctgccaagtgacacaaggcttgtcctcctcaatgccatctacctgagtgccaagtggaagaccacatttgaccccaagaagaccaggatggagcccttccacttcaagaactcagttatcaaagtgcccatgatgaatagcaagaagtaccctgtggcccacttcattgaccagactttgaaggccaaggtggggcagctccagctctcccacaatctgagcctggtcatcctggtaccccagaacctgaaacacaggcttgaagacatggaacaggccctcagcccatcagtgttcaaggcaataatggagaagctggagatgtccaagttccagcccactctcctgacccttcccaggatcaaagtcacaaccagccaggacatgctctcaatcatggagaagttggagttctttgacttcagctatgaccttaacctgtgtgggctgacagaggaccctgaccttcaggtctctgccatgcagcaccagacagtgctggaactgacagagactggggtggaggcagctgcagctagtgcaatatctgtggccagaaccctgctggtctttgaggtgcagcagcccttcctgtttgtgctgtgggaccagcagcacaagttccctgtgttcatggggagggtctatgaccccagggcctga

SEQ ID NO: 126 - DNA, 1503 bp, Artificial Sequence
  SERPING1_coH4
atggcctccaggctgaccctgctgaccctcctgctgctcctgctggctggggacagggccagcagcaaccccaatgccacctcctcctccagtcaggacccagagtctctccaggacaggggggagggcaaggtggccaccactgtgatcagcaagatgctgtttgtggagcccatcctggaggtcagctccctgcctacaaccaactcaaccaccaacagtgccaccaagataactgccaacaccactgatgagcccacaacccagccaaccacagagcctaccacacagcctacaatccaacccacccagcccactacccagctgcccacagactcacctacacagcccaccactggctccttctgcccaggaccagtgaccctctgctctgacctggagagtcactccacagaggcagtgctgggggatgccctggtggacttcagcctgaagctgtaccatgccttcagtgcaatgaagaaggtggagaccaacatggccttctccccattctcaattgcctccctcctgacccaggtcctgctgggggcaggggagaacactaagaccaacctggagtccatcctctcctaccccaaggacttcacctgtgtgcaccaggccctgaaggggttcaccactaagggggtgacctcagtgtcccagattttccacagcccagacctggccatcagggacacctttgtgaatgcctccaggaccctgtactccagcagccccagagtcctgagcaacaactcagatgcaaacttggagctcatcaacacctgggtggccaagaacaccaacaacaagatcagcaggctgttggacagtctgccatcagacacaaggctggtcctcctgaatgctatctacctcagtgccaagtggaagacaacctttgaccccaagaagaccagaatggagcccttccacttcaagaactcagtcatcaaggtccccatgatgaacagcaagaagtaccctgtggcccacttcattgaccagaccctgaaggccaaggtggggcagctgcagctctcccacaacctgtccctggtcatcctggtcccccagaacctcaagcacaggctggaggacatggagcaggccctcagcccctctgtgttcaaggccataatggagaagctggagatgtccaagttccagcccaccctcctcaccctacccaggatcaaggtgaccaccagccaggacatgctctccatcatggagaagttggagttctttgacttctcttatgacctcaacctgtgtgggctgacagaggaccctgacctgcaggtgtctgcaatgcagcaccagacagtgctggagctgactgagactggggtggaggctgctgctgcctctgccatctctgtggccagaaccctgctggtgtttgaggtgcagcagcccttcctgtttgtgctgtgggaccagcagcacaagttccctgtgttcatggggagggtgtatgaccccagggcctag

SEQ ID NO: 127 - DNA, 1503 bp, Artificial Sequence
  SERPING1_coH5
atggcctccaggctgaccctgctgaccctcctgctgcttctgctggctggggatagagcctcctcaaatccaaatgctacctcttcaagctcccaggacccagaaagccttcaagacaggggggagggcaaggtggctacaactgtgatttccaagatgctgtttgtggaacccatccttgaagtcagcagcttgcctactaccaacagcacaaccaattcagccaccaaaattacagctaataccacagatgagccaactactcaacccaccactgagcccaccacacagcccactattcagcccacccaaccaactacccaactcccaactgattctcctacccaacctaccactggctccttctgccctggacctgttactctctgctctgacttggagtctcattcaacagaggcagtgctgggggatgctttggttgatttctccctgaagctctaccatgccttttcagcaatgaagaaggtggagaccaacatggccttttccccattcagtatagcaagtctcctgactcaggtcctgctgggggcaggggagaatacaaagaccaacctggagagcatcctcagttatcccaaggacttcacctgtgtccaccaggccctgaagggcttcacaacaaagggggtgacctcagtctctcagattttccacagcccagacctggccataagggacacctttgtgaatgcctctaggaccctgtactccagctcccccagagtcctaagcaacaacagtgatgcaaatttggagctcatcaacacctgggtggccaagaacaccaacaacaagatcagcaggctgctagacagtctgccaagtgatacaaggcttgtcctcctcaatgctatctacctgagtgccaagtggaagacaacatttgatcccaagaaaaccagaatggaaccctttcacttcaaaaactcagttataaaagtgcccatgatgaatagcaagaagtaccctgtggcccatttcattgaccaaactttgaaagccaaggtggggcagctgcagctctcccacaatctgagtctggtaatcctggtaccccagaacctgaaacataggcttgaagacatggaacaggctctcagcccttctgttttcaaggcaataatggagaagctggagatgtccaagttccagcccactctcctaacactacccaggatcaaagtgacaaccagccaggatatgctctcaatcatggagaaattggaattttttgatttttcttatgaccttaacctgtgtgggctgacagaggaccctgatcttcaggtttctgcaatgcagcaccagacagtgctggaactgacagagactggggtggaagctgctgcagcaagtgcaatatctgtggccagaaccctgctggtctttgaagtgcagcagcccttcctgtttgtgctgtgggaccagcagcacaagttccctgtcttcatggggagggtatatgaccccagggcctga

SEQ ID NO: 128 - DNA, 1503 bp, Artificial Sequence
  SERPING1_coH6
atggcctccaggctgaccctgctgaccctcctgctgcttctgctggctggggatagggcctcctctaatccaaatgctaccagcagtagttcacaggacccagagagcctgcaggacaggggggagggcaaggtggctactactgtgatttccaagatgctgtttgtggagcccatcctggaggtctcctccctgcctaccaccaactccactaccaactcagccaccaaaattacagctaataccacagatgagccaacaacacagccaactacagaacccaccacccagcctactatccaacccacccaaccaactacccagctccctactgattctcctactcagcccacaactggctccttctgcccaggtcctgttaccctctgctctgacctggaatctcattccacagaggcagtcctgggggatgccttggtggacttctccctgaagctctaccatgctttttctgctatgaagaaggtggagaccaacatggccttttccccattctccatagccagtctcctgactcaggtcctgctgggggcaggggagaacacaaagaccaacctggagagcatcctctcatatcccaaggacttcacctgtgtgcaccaggccctgaagggcttcacaaccaagggggtcacctcagtctcccagattttccacagcccagacctggccatcagggacacctttgtgaatgcctccaggaccttatacagcagctcacccagggtgctaagcaacaacagtgatgcaaacttggagctcatcaacacctgggtggccaagaacaccaacaacaagatcagcaggctgctagactccctgcccagtgatacaaggcttgtcctcctcaatgccatctacctgagtgccaagtggaagacaacatttgatcccaagaagaccagaatggagccctttcacttcaagaactcagtcataaaggtgcccatgatgaatagcaagaagtaccctgtggcccatttcattgaccagactctgaaagccaaggtggggcagctccagctctcccacaacctgagcctggtaatcctggtgccccagaacctgaagcacaggcttgaggacatggaacaggctctcagcccttctgttttcaaggcaataatggagaagctggagatgtccaagttccagcccactctcctaacacttcccaggatcaaggtgaccaccagccaggatatgctcagcatcatggagaaactagagttctttgacttctcttatgaccttaacctgtgtggcctgactgaggaccctgaccttcaggtttctgcaatgcagcaccagacagtgctggaactgacagagactggggtggaagctgctgcagcatcagcaatcagtgtggccagaaccctcctggtgtttgaggtgcagcagcccttcctgtttgtgctgtgggaccagcagcacaagttccctgtcttcatggggagggtgtatgaccccagggcctga

SEQ ID NO: 129 - DNA, 1503 bp, Artificial Sequence
  SERPING1_coH7
atggcctccaggctgaccctgctgaccctcctgctgcttctgctggctggggatagggccagctccaaccccaatgccacttccagctcttcccaagatccagaatcccttcaggacaggggggagggcaaggtggcaactactgtgatttccaagatgctgtttgtggagcccatcctggaggtttccagcttgccaacaaccaatagcaccaccaactcagccaccaagatcacagccaataccacagatgagcctacaacacagccaactactgagcccaccacacagcctaccatccaacccacccaaccaaccacccagctccccacagactcccctacccagcccacaactggctccttctgcccaggacctgttaccctctgctctgacttggagtcacattctacagaggcagtgctgggggatgctttggtagatttcagcctgaagctctaccatgccttctctgccatgaagaaggtggagaccaacatggccttctccccattcagtatagccagtctcctgactcaggtcctgctgggggcaggggagaacacaaagactaacctggagagcatcctcagttaccccaaggacttcacctgtgtccaccaggccctgaaggggttcaccaccaagggggtgacctcagtctctcagattttccacagcccagacctggccatcagggacacctttgtgaatgcctctaggaccctctacagcagctcacccagagtccttagcaacaacagtgatgccaacctggagctcatcaacacctgggtggccaagaacaccaacaacaagatcagcaggctgctagactcactgcctagtgacacaaggcttgtcctcctcaatgctatctacctgagtgccaagtggaagaccacatttgaccccaagaagaccaggatggagccctttcacttcaagaactctgtcataaaggtgcccatgatgaacagcaagaagtaccctgtggcccatttcatagaccagactttgaaagccaaggtggggcagctgcagctctcccacaacctgagtctggtaatcctggtaccccagaacctgaagcataggcttgaggacatggagcaggctctctccccctctgtcttcaaggccataatggagaagctggagatgtccaagttccagcccactctgctaactctccccaggatcaaagtgactaccagccaggacatgctgtcaatcatggagaagttggagttctttgatttctcctatgaccttaacctgtgtgggctgacagaggaccctgatctgcaggtttctgccatgcagcaccagacagtgctggaactgacagagactggggtggaggctgctgcagcctcagcaatcagtgtggccagaaccctgctggtgtttgaggtccagcagcccttcctgtttgtgctgtgggaccagcagcacaagttcccagtcttcatggggagggtctatgaccccagggcctag

SEQ ID NO: 130 - DNA, 1503 bp, Artificial Sequence
  SERPING1_coH8
atggcctccaggctgaccctgctgaccctcctgctgcttctgctggctggggacagagcctcctcaaatccaaatgccactagctcctcttcccaagacccagaatcccttcaagacaggggggagggcaaggttgccacaactgtgattagcaagatgctgtttgtggagcccatcctggaggtctccagcctgcctaccaccaacagcacaaccaactcagccaccaagattacagctaataccactgatgagcctacaacccagccaactacagaacccaccactcagcctaccatccaacccacccaaccaaccacccagctccccacagacagccctacacagcccactactggctccttctgcccaggacctgtgaccctctgctctgacttggagtctcactccacagaggcagtgctgggggatgctttggtagacttctccctgaagctctaccatgccttttctgctatgaagaaggtggagaccaacatggccttttccccattcagtatagccagtctcctgactcaggtcctgctgggggcaggggagaacactaagaccaacctggagagcatcctcagttaccccaaggacttcacctgtgtccaccaggccctgaagggcttcacaaccaagggggtcacctcagtctctcagattttccacagcccagacctggccatcagggacacctttgtgaatgcctcaaggaccctttacagcagcagtcccagggtcctaagcaacaacagtgatgcaaaccttgagctcatcaacacctgggtggccaagaacaccaacaacaagatcagcaggctgctagacagtctgccctctgatacaaggcttgtcctcctcaatgctatctacctcagtgccaagtggaagactacatttgaccccaagaagaccaggatggaacccttccacttcaagaactcagttataaaggtgcccatgatgaatagcaagaagtaccctgtggcccacttcattgaccaaactttgaaggccaaggtggggcagctgcagctctcccacaatctgagtctggtcatcctggtaccccagaacctcaaacacaggcttgaagacatggagcaggctctctccccttctgttttcaaggcaataatggagaagctggagatgtccaagttccagcccaccctcctaacactacccaggatcaaggtgacaaccagccaggatatgctctcaatcatggagaagttggaattctttgacttttcttatgaccttaacctgtgtgggctgacagaggaccctgaccttcaggtttctgccatgcagcaccagactgtgctggaactgacagagactggggtggaagctgctgcagcatcagcaatatctgtggccagaaccctgctggtgtttgaagtgcagcagcccttcctgtttgtgctgtgggaccagcagcacaagttccctgtcttcatggggagggtatatgaccccagggcctga

SEQ ID NO: 131 - DNA, 1503 bp, Artificial Sequence
  SERPING1_coH9
atggcctccaggctgaccctgctgaccctcctgctgctcctgctggctggggatagagcctctagcaatccaaatgctaccagctcctcctcccaggatcctgaatcccttcaagacaggggggagggcaaggtggcaactactgtgatttccaagatgctgtttgtggagcccatcctggaggttagcagccttcctactaccaactcaacaaccaattcagccaccaaaattacagctaataccacagatgagccaacaactcaacccaccactgagcccaccactcagccaaccatccaacccacccaaccaactacccagctcccaacagattctcctacccagcctaccactggctccttctgcccaggacctgttactctctgctctgacttggaaagccattctactgaggctgtcctgggggatgctttggtagacttctccctgaagctctaccatgcattttcagcaatgaagaaggtggagaccaacatggccttttccccattcagtatagcaagtctcctgactcaggtcctgctgggggcaggggagaatacaaagaccaacctggagagcatcctcagttatcccaaggacttcacctgtgtccaccaggccctgaagggcttcacaacaaagggggtgacctcagtctctcagattttccacagcccagacctggccataagggacacctttgtgaatgcctctaggaccctgtactcaagctcccccagagtcctaagcaacaacagtgatgcaaatttggagctcatcaacacctgggtggccaagaacaccaacaacaagatcagcaggctgctagacagtctgccaagtgatacaaggcttgtcctcctcaatgctatctacctgagtgccaagtggaagacaacatttgatcccaagaaaaccagaatggaaccctttcacttcaaaaactcagttataaaagtgcccatgatgaatagcaagaagtaccctgtggcccatttcattgaccaaactttgaaagccaaggtggggcagctgcagctctcccacaatctgagtctggtaatcctggtaccccagaacctgaaacataggcttgaagacatggaacaggctctcagcccttctgttttcaaggccataatggagaagctggagatgtccaagttccagcccactctcctaacactacccaggatcaaagtgacaaccagccaggatatgctctcaatcatggagaaattggaattttttgatttttcttatgaccttaacctgtgtgggctgacagaggaccctgatcttcaggtttctgcaatgcagcaccagacagtgctggaactgacagagactggggtggaagctgctgcagcaagtgcaatatctgtggccagaaccctgctggtctttgaagtgcagcagcccttcctgtttgtgctgtgggaccagcagcacaagttccctgtcttcatggggagggtatatgaccccagggcctga

SEQ ID NO: 132 - DNA, 1503 bp, Artificial Sequence
  SERPING1_coH10
atggcctccaggctgaccctgctgaccctcctgcttcttctgctggctggggatagagcctcctcaaatccaaatgctaccagctctagctctcaggatccagaatcccttcaagacaggggggagggcaaggtggcaactactgtgatttccaagatgctgtttgtggagcccatcctggaagtgtccagcttgcctacaaccaactccacaaccaattcagccaccaaaattacagctaataccacagatgagccaacaactcaacccaccactgagcccaccactcagcccactatccaacccacccaaccaactacccagctcccaacagattctcctacccagcctaccactggctccttctgccctggacctgttactctctgctctgacttggaaagccattcaactgaggcagtcctgggggatgctttggtagacttctccctgaagctttaccatgcattttcagctatgaagaaagtggagaccaacatggccttttccccattcagtatagcaagtctcctgactcaggtcctgctgggggcaggggagaatacaaagaccaacctggagagcatcctcagttatcccaaggacttcacctgtgtccaccaggccctgaagggcttcacaacaaagggggtgacctcagtctctcagattttccacagcccagacctggccataagggacacctttgtgaatgcctctaggaccctctacagcagctccccaagagtcctaagcaacaacagtgatgcaaatttggagctcatcaacacctgggtggccaagaacaccaacaacaagatcagcaggctgctagacagtctgccaagtgatacaaggcttgtcctcctcaatgctatctacctgagtgccaagtggaagacaacatttgatcccaagaaaaccagaatggaaccctttcacttcaaaaactcagttataaaagtgcccatgatgaatagcaagaagtaccctgtggcccatttcattgaccaaactttgaaagccaaggtggggcagctgcagctctcccacaatctgagtctggtaatcctggtaccccagaacctgaaacataggcttgaagacatggaacaggctctcagcccttctgttttcaaggccataatggagaagctggagatgtccaagttccagcccactctcctaacactacccaggatcaaagtgacaaccagccaggatatgctctcaatcatggagaaattggaattttttgatttttcttatgaccttaacctgtgtgggctgacagaggaccctgatcttcaggtttctgcaatgcagcaccagacagtgctggaactgacagagactggggtggaagctgctgcagcaagtgcaatatctgtggccagaaccctgctggtctttgaagtgcagcagcccttcctgtttgtgctgtgggaccagcagcacaagttccctgtcttcatggggagggtatatgaccccagggcctga

SEQ ID NO: 133 - DNA, 1503 bp, Artificial Sequence
  SERPING1_coH11
atggcctccaggctgaccctgctgaccctcctgcttctcctgctggctggggacagggcctctagcaatccaaatgctaccagctcctcctcccaggatccagaaagcttgcaagacaggggggaaggcaaggtggcaactactgtgatttccaagatgctgtttgttgagcccatcctggaggtctctagcttgcctactaccaactcaactaccaattcagccaccaaaattacagctaataccacagatgagccaacaacccaacccaccactgagcccaccactcagcccaccatccaacctacccaaccaactacccagctcccaactgattctcctacccagcctaccactggctccttctgcccaggacctgttactctctgctctgaccttgaatcccattcaacagaggcagtgctgggggatgctttggtagatttctccctgaagctttaccatgccttttcagctatgaagaaggtggagaccaacatggccttttccccattcagtatagcaagtctcctgactcaggtcctgctgggggcaggggagaatacaaagaccaacctggagagcatcctcagttatcccaaggacttcacctgtgtccaccaggccctgaagggcttcacaacaaagggggtgacctcagtctctcagattttccacagcccagacctggccataagggacacctttgtgaatgcctctaggaccctgtacagcagctcccccagagtcctaagcaacaacagtgatgcaaatttggagctcatcaacacctgggtggccaagaacaccaacaacaagatcagcaggctgctagacagtctgccaagtgatacaaggcttgtcctcctcaatgctatctacctgagtgccaagtggaagacaacatttgatcccaagaaaaccagaatggaaccctttcacttcaaaaactcagttataaaagtgcccatgatgaatagcaagaagtaccctgtggcccatttcattgaccaaactttgaaagccaaggtggggcagctgcagctctcccacaatctgagtctggtaatcctggtaccccagaacctgaaacataggcttgaagacatggaacaggctctcagcccttctgttttcaaggcaataatggagaagctggagatgtccaagttccagcccactctcctaacactacccaggatcaaagtgacaaccagccaggatatgctctcaatcatggagaaattggaattttttgatttttcttatgaccttaacctgtgtgggctgacagaggaccctgatcttcaggtttctgcaatgcagcaccagacagtgctggaactgacagagactggggtggaagctgctgcagcaagtgcaatatctgtggccagaaccctgctggtctttgaagtgcagcagcccttcctgtttgtgctgtgggaccagcagcacaagttccctgtcttcatggggagggtatatgaccccagggcctga

SEQ ID NO: 134 - DNA, 1503 bp, Artificial Sequence
  SERPING1_coH13
atggcctccaggctgaccctgctcaccctcctgctgctcctgctggctggggacagggcctccagcaaccccaatgcaaccagcagttcctctcaggatccagagtccctgcaggacaggggggagggcaaggtggccaccactgtgatctccaagatgctgtttgtggagcccatcctggaggtatccagcctccctaccaccaacagcaccaccaactcagccaccaaaatcactgctaacaccactgatgagcccacaacccagccaactactgagccaaccactcagcctaccatccaacccacccagcctactacccagctccccactgactctcctacccagcccaccactggcagcttctgcccaggacctgtgaccctctgctctgacttggagtcccattccacagaggcagtgctgggggatgccctggtagacttctccctgaagctctaccatgcattctctgccatgaagaaggtggagaccaacatggccttctcccccttcagcattgccagcctcctgacccaggtcctgctgggggcaggggagaacacaaagacaaacctggagtccatcctcagctaccccaaggacttcacctgtgtccaccaggccctgaagggcttcacaaccaagggggtgaccagtgtctcacagattttccacagcccagacctggccatcagggacacctttgtgaatgccagtaggaccctgtacagctccagtcccagagtcctcagcaacaactctgatgccaacctggagctgatcaacacctgggtggccaagaacaccaacaacaagatcagcaggctgctagactcactgccctctgacacaaggctggtcctcctcaatgcaatctacctgagtgccaagtggaagaccacctttgaccccaagaagaccaggatggagcccttccacttcaagaacagtgtcattaaggtgcccatgatgaacagcaagaagtaccctgtggcccacttcattgaccagaccttgaaggccaaggtggggcagctgcagctctcccacaacctgtcactggtcatcctggttccccagaacctgaagcacaggcttgaggacatggagcaggccctcagcccttctgtattcaaggccataatggagaagctggagatgagcaagttccagcccactctgctgaccctacccaggatcaaggtgaccaccagccaggacatgctctcaatcatggagaagttggagttctttgacttcagctatgacctgaacctgtgtgggctgacagaggaccctgacctgcaggtgtcagccatgcagcaccagacagtgctggaactgacagagactggggtggaagctgctgcagcaagtgctatttcagtggccaggaccctgctggtctttgaggtccagcagcccttcctgtttgtgctctgggaccagcagcacaagttccctgtcttcatggggagggtctatgaccccagggcctga

SEQ ID NO: 135 - DNA, 1503 bp, Artificial Sequence
  SERPING1_coH14
atggcctccaggctgaccctgctgacccttctgctgttgctgctggcaggggacagggcctcctcaaaccccaatgccaccagctcttccagtcaggacccagagagcctccaggacaggggggagggcaaggtggccaccactgtgatctccaagatgctgtttgtggagcccatcctggaggtgtccagcttgcccacaaccaacagcacaaccaattcagccaccaagatcactgctaacaccacagatgagcctacaacccagccaaccacagagcccaccacccagcctacaatccaacccacccaacccactacccagctcccaacagactcccctacccagcccacaactggctccttctgcccaggaccagtcactctctgctctgacttggagtcacattcaacagaggcagtgctgggggatgctttggtagacttctccctgaagctctaccatgccttctcagcaatgaagaaggtggagaccaacatggccttctccccattctccattgccagtctcctgactcaggtcctgctgggggctggggagaacacaaagacaaacctggagagcatcctcagctaccccaaggacttcacctgtgtccaccaggccctgaaggggttcactaccaagggggtgaccagtgtctctcagattttccacagccctgacctggccataagggacacctttgtgaatgccagtaggaccctgtatagcagctcccccagagtgctgagcaacaacagtgatgccaacctggagctcatcaacacctgggtggccaagaacaccaacaacaagatcagcaggctgctggactccctgccctctgacaccaggctggtcctgctcaatgctatctacctgagtgccaagtggaagaccacctttgaccccaagaaaaccagaatggagcccttccacttcaaaaactctgtcatcaaggtgcccatgatgaacagcaagaagtacccagtggcccacttcatagaccaaaccctgaaggccaaggtggggcagctgcagctctcccacaacctgtctctggtcatcctggtgccccagaacctgaagcacaggcttgaggacatggagcaggccctcagcccttctgtcttcaaggccattatggagaagctggagatgtccaagttccagcccaccctcctaacactccccaggatcaaagtgacaaccagccaggacatgctcagcatcatggagaagttggagttttttgacttctcctatgacctaaacctgtgtggcctgacagaggaccctgaccttcaggtttctgccatgcagcaccagactgtgctggagctgacagagactggggtggaagctgctgcagccagtgctatctctgtggccagaaccctcctggtctttgaggtgcagcagcccttcctgtttgtcctgtgggaccagcagcacaagttcccagtcttcatggggagggtgtatgaccccagggcctga

SEQ ID NO: 136 - DNA, 1503 bp, Artificial Sequence
  SERPING1_coH15
atggcctccaggctaaccctgctcaccctcctgcttcttctgctggctggggacagggcctcctcaaatccaaatgctaccagctcttcttcccaggatccagaaagcttgcaagacaggggggagggcaaggtggcaacaactgtcatttccaagatgctgtttgtggagcccatcctggaggtttccagcttgcctactaccaactcaactaccaattcagccaccaaaattactgctaataccactgatgagccaacaacccagccaaccactgagcccaccactcagcccaccatccaacccacccaaccaactacccagctcccaacagattctcctacccagcctaccactggctccttctgccctggacctgttactctctgctctgacttggaaagccattcaacagaggctgtgctgggggatgctttggtagatttctccctgaagctttaccatgcattttcagctatgaagaaggtggagaccaacatggccttttccccattcagtatagcaagtctcctgactcaggtcctgctgggggcaggggagaatacaaagaccaacctggagagcatcctcagttatcccaaggacttcacctgtgtccaccaggccctgaagggcttcacaacaaagggggtgacctcagtctctcagattttccacagcccagacctggccataagggacacctttgtgaatgcctctaggaccctgtatagctccagccccagagtcctaagcaacaacagtgatgcaaatttggagctcatcaacacctgggtggccaagaacaccaacaacaagatcagcaggctgctagacagtctgccaagtgatacaaggcttgtcctcctcaatgctatctacctgagtgccaagtggaagacaacatttgatcccaagaaaaccagaatggaaccctttcacttcaaaaactcagttataaaagtgcccatgatgaatagcaagaagtaccctgtggcccatttcattgaccaaactttgaaagccaaggtggggcagctgcagctctcccacaatctgagtctggtaatcctggtaccccagaacctgaaacataggcttgaagacatggaacaggctctcagcccttctgttttcaaggccataatggagaagctggagatgtccaagttccagcccactctcctaacactacccaggatcaaagtgacaaccagccaggatatgctctcaatcatggagaaattggaattttttgatttttcttatgaccttaacctgtgtgggctgacagaggaccctgatcttcaggtttctgcaatgcagcaccagacagtgctggaactgacagagactggggtggaagctgctgcagcaagtgcaatatctgtggccagaaccctgctggtctttgaagtgcagcagcccttcctgtttgtgctgtgggaccagcagcacaagttccctgtcttcatggggagggtatatgaccccagggcctga

SEQ ID NO: 137 - DNA, 1503 bp, Artificial Sequence
  SERPING1_coH18
atggcctccaggctgaccctgctgaccctcctgctgcttctgctggctggggacagagcctcctcaaatccaaatgccacttctagctcctcacaggatccagaaagcttgcaagacaggggggagggcaaggtggctacaactgtcatttccaaaatgctgtttgtggagcccatcctggaggtttccagcttgcctactaccaactcaacaaccaattcagccaccaaaattacagctaataccactgatgagccaaccactcaacctaccacagagcccaccactcagcccaccattcaacccacccaaccaactacccagctcccaacagattctcctacccagcctaccactggatccttctgcccaggacctgttactctctgctctgacttggaaagccattcaactgaggcagtgctgggggatgctttggtagatttctccctgaagctctaccatgccttttctgctatgaagaaggtggagaccaacatggccttttccccattcagtatagcaagtctcctgactcaggtcctgctgggggcaggggagaatacaaagaccaacctggagagcatcctcagttatcccaaggacttcacctgtgtccaccaggccctgaagggcttcacaacaaagggggtgacctcagtctctcagattttccacagcccagacctggccataagggacacctttgtgaatgcctctaggaccctatactccagcagccccagggtcctaagcaacaacagtgatgcaaatttggagctcatcaacacctgggtggccaagaacaccaacaacaagatcagcaggctgctagacagtctgccaagtgatacaaggcttgtcctcctcaatgctatctacctgagtgccaagtggaagacaacatttgatcccaagaaaaccagaatggaaccctttcacttcaaaaactcagttataaaagtgcccatgatgaatagcaagaagtaccctgtggcccatttcattgaccaaactttgaaagccaaggtggggcagctgcagctctcccacaatctgagtctggtaatcctggtaccccagaacctgaaacataggcttgaagacatggaacaggctctcagcccttctgttttcaaggcaataatggagaagctggagatgtccaagttccagcccactctcctaacactacccaggatcaaagtgacaaccagccaggatatgctctcaatcatggagaaattggaattttttgatttttcttatgaccttaacctgtgtgggctgacagaggaccctgatcttcaggtttctgcaatgcagcaccagacagtgctggaactgacagagactggggtggaagctgctgcagcaagtgcaatatctgtggccagaaccctgctggtctttgaagtgcagcagcccttcctgtttgtgctgtgggaccagcagcacaagttccctgtcttcatggggagggtatatgaccccagggcctga

SEQ ID NO: 138 - DNA, 1503 bp, Artificial Sequence
  SERPING1_coH19
atggcctccaggctgaccctgctgaccctcctcctgttgctgctggctggggacagggcatccagcaacccaaatgccaccagctcttctagtcaggacccagagtctctccaggacaggggggagggcaaggtggccacaactgtcatctccaagatgctgtttgtggagcccatcctggaggtgtccagcctgcccaccaccaactccacaaccaattctgccaccaagatcactgccaataccactgatgagcctacaacacagccaaccacagagcccaccacacagcctaccatccaacccacccaacccacaacccagctccccacagacagccccacccagcccacaactggctccttctgcccaggacctgtgaccctctgctctgacttggagagccactcaactgaggcagtgctgggggatgccttggtggacttctccctgaagctctaccatgccttctcagccatgaagaaggtggagaccaacatggccttcagccccttctccatagcctccctcctgactcaggtcctcctgggggcaggggagaacacaaagacaaacctggagagcatcctcagttaccccaaggacttcacctgtgtgcaccaggccctgaagggcttcaccaccaagggggtgaccagtgtcagccagattttccacagcccagacctggccatcagggacacctttgtcaatgcctccaggaccctgtacagctccagccccagagtcctgagcaacaacagtgatgccaacctggagctcatcaacacctgggtggccaagaacaccaacaacaagatcagcaggctgttggacagcctcccaagtgataccaggctagtgctcctcaatgccatctacctgagtgccaagtggaagaccacctttgaccccaagaagaccaggatggaacccttccacttcaagaacagtgtcattaaggtgcccatgatgaacagcaagaagtaccctgtggcccacttcattgaccagaccttgaaggccaaggtgggccagctgcagctctcccacaacctgtccctggtcatcctggtgccccagaacctgaagcacaggctggaggacatggaacaggctctctccccctctgtcttcaaggccataatggagaagctggagatgtccaagttccagcccaccctcctaacactccccaggatcaaggtgacaaccagccaggacatgctcagcatcatggagaagttggagttctttgacttctcttatgacctgaacctgtgtgggctgacagaggaccctgacctccaggtgtctgccatgcagcaccagacagtgctggaactgactgagactggggtggaggctgcagcagcatcagccatatctgtggccagaaccctgctggtctttgaggtccagcagcccttcctgtttgtgctgtgggaccagcagcacaagttccctgtcttcatggggagggtctatgaccccagggcctga

SEQ ID NO: 139 - DNA, 1503 bp, Artificial Sequence
  SERPING1_coH20
atggcctccaggctcaccctgctgaccctcctcctcctactgctggctggggacagggcctccagcaaccccaatgccacctcctctagttctcaggacccagagtccttgcaggacaggggggagggcaaggtggctaccactgtgatcagcaagatgctctttgtggagcccatcctggaggtctccagcctccccactaccaacagtaccaccaactcagccaccaagatcacagctaacaccacagatgagccaacaacccagccaactacagagccaaccacccagcctaccatccaacccacccaacccactacccagctccccacagactcccctacacagcccactactggctccttctgccctggccctgtcaccctctgctctgaccttgagagtcacagcacagaggcagtcctgggggatgcccttgtggacttctccctcaagctgtaccatgccttctcagccatgaagaaggtggagaccaacatggccttctcccccttcagtattgcaagcctcctgacccaggtcctgctgggggcaggggagaacactaagaccaacctggagagcatcctgtcctaccccaaggacttcacctgtgtccaccaggccctgaagggcttcaccaccaagggggtgacctcagtgtcccagatattccacagcccagacctggccatcagggacacctttgtgaatgcctccaggaccctgtacagctcctcccccagggtcctaagcaacaactcagatgccaacttggagctgatcaacacctgggtggccaagaacaccaacaacaagatcagcaggctgctggactccctgccctcagacaccaggcttgtcctgctcaatgccatctacctgagtgccaagtggaagactacctttgaccccaagaagaccaggatggagcccttccacttcaagaactcagtcatcaaggtgcccatgatgaacagcaagaagtaccctgtggcccacttcattgaccaaacccttaaggccaaggtggggcagctccagctcagccacaacctgtccctggtcatcctggttccccagaacctgaagcacaggctggaggacatggagcaggccctcagcccctctgtcttcaaggccataatggagaagctggagatgtccaagttccagcccaccctcttgaccttgcccaggatcaaggtcaccaccagccaggacatgctgtccatcatggagaaactggagttctttgacttcagctatgacctcaacctctgtgggctgacagaggaccctgacctgcaggtgtctgccatgcagcaccagacagtgctggaactgacagagacaggggtggaagctgctgcagcttctgccatctctgtggccagaaccctgctggtctttgaggtgcagcagcccttcctgtttgtgctgtgggaccagcagcacaagttcccagtcttcatggggagggtgtatgaccccagggcctag

SEQ ID NO: 140 - DNA, 1503 bp, Artificial Sequence
  SERPING1_coBC1
atggcctccaggctgaccctgctgaccctcctgctgctcctgctggctggggacagggccagcagcaaccccaatgccaccagctccagcagccaggacccagagtctctgcaggacaggggggagggcaaggtggccaccacagtgatcagcaagatgctgtttgtggagcccatcctggaggtgagcagcttgcctaccaccaacagcaccaccaactctgccaccaagatcacagccaacaccacagatgagcccacaacccagcctaccacagagccaaccacacagcctacaatccaacccacccagccaactacccagctgcccacagacagccctacacagcccaccacaggcagcttctgccctgggcctgtgaccctgtgctctgacttggagagccactccacagaggctgtgctgggggatgccctggtagacttcagcctgaagctgtaccatgccttctctgccatgaagaaggtggagaccaacatggccttcagccccttctctattgccagcctcctgacacaggtcctgctgggggctggggagaataccaagacaaacctggagagcatcctgagctatcccaaggacttcacctgtgtgcaccaggccctgaagggcttcacaacaaagggggtgacctctgtgtctcagattttccacagccctgacctggccattagggacacctttgtgaatgcctccaggaccctgtactcaagcagccccagagtgcttagcaacaactctgatgctaacttggagctgatcaacacctgggtggccaagaacaccaacaacaagatcagcaggctgttggacagcctgccttctgacaccaggctggtgctcctgaatgccatctacctgtctgccaagtggaagacaacatttgaccccaagaagaccagaatggagcccttccacttcaagaactctgtgattaaggtgcccatgatgaacagcaagaagtaccctgtggcccacttcattgaccagacactcaaggccaaggtgggccagctgcagctcagccacaatctgtctctggttatcctggtgccccagaacctgaagcacaggcttgaggacatggagcaggccctcagcccctctgttttcaaggccattatggagaagctggagatgagcaagttccagcccactctcctgacccttcccaggatcaaggtgaccaccagccaggatatgctgtctatcatggagaagttggagttctttgacttcagctatgacctgaacctgtgtggcctgacagaggaccctgatcttcaggtttctgctatgcagcaccagacagtgctggaactgacagagacaggggtggaggctgctgctgcttctgctatctctgtggccagaaccctgctggtgtttgaagtgcagcagcccttcctgtttgtgctgtgggaccagcagcacaagttccctgtgttcatgggcagggtttatgaccccagggcctga

SEQ ID NO: 141 - DNA, 1503 bp, Artificial Sequence
  SERPING1_coBC2
atggcctccaggctgaccctgctgaccctcctgctgctcctgctggctggggacagagccagcagcaaccccaatgccaccagctccagctctcaggacccagagagcctgcaggacaggggggagggcaaggtggccaccacagtgatcagcaagatgctgtttgtggagcccatcctggaggtgagcagcctccccaccaccaacagcaccaccaattctgccaccaagatcacagccaacaccacagatgagcccacaacccagcctaccacagagccaaccacacagcccaccatccaacccacccaacctactacccagctgcccacagacagccctacccagcctaccacaggcagcttctgccctggccctgtgaccctgtgctctgacttggagagccactccacagaggctgtgctgggggatgccctggtggatttcagcctgaagctgtaccatgccttctctgccatgaagaaggtggagaccaacatggccttcagccccttcagcattgccagcctcctgacccaggtcctgctgggggctggggagaacacaaagaccaacctggagagcatcctgagctaccccaaggacttcacctgtgtgcaccaggccctgaagggcttcaccaccaagggggtgacctctgtgagccagattttccacagccctgacctggccatcagggacacctttgtgaatgcctccaggaccctgtacagctctagccccagggtgctgagcaacaactctgatgccaacttggagctgatcaacacctgggtggccaagaacaccaacaacaagatcagcaggctgctggacagcctgccctctgacaccaggctggtgctcctgaatgccatctacctgtctgccaagtggaagaccacctttgaccccaagaagaccagaatggagcccttccacttcaagaactctgtgataaaggtgcccatgatgaacagcaagaagtaccctgtggcccacttcattgaccagaccctgaaagccaaggtgggccagctgcagctcagccacaacctgagcctggtcatcctggtgccccagaacctgaagcacaggctggaggacatggaacaggccctcagcccctctgtgttcaaggccattatggagaagctggagatgagcaagttccagcccactctgctgacactgcccaggatcaaggtgaccaccagccaggacatgctgagcatcatggagaagttggagttctttgacttcagctatgacctgaacctgtgtggcctgacagaggaccctgacctccaggtgtctgccatgcagcaccagacagtgctggaactgacagagacaggggtggaagctgctgctgcctctgccatctctgtggccagaaccctgctggtgtttgaggtgcagcagcccttcctgtttgtgctgtgggaccagcagcacaagttccctgtgttcatgggcagggtgtatgaccccagggcctga

SEQ ID NO: 142 - DNA, 1543 bp, Artificial Sequence
  SERPING1_coI21(-RIDD)
atggcctctaggctgactctgctgactctgctgctcctgctgctggctggggacagggccagctctaaccccaatgctacttctagctcctctcaggaccctgagagccttcaggacaggggggagggcaaggtggccaccactgtgatctctaagatgctgtttgtggagcccatcctggaggtgagcagcctgcccaccaccaacagcaccaccaactctgccactaagatcactgccaacaccactgatgagcccaccacccagcccactactgagcccaccacccagcctactatccagcccacccagcccactacccagctgcccactgacagccctacccagcccaccactggcagcttctgccctgggcctgtgaccctgtgctctgacctggagagccattctactgaggctgtgctgggggatgccctggtggacttctctctgaagctgtaccatgctttctctgccatgaagaaggtggagactaacatggcttttagccccttcagcattgctagcctgctgacccaggtgctgctgggggctggggagaacactaagaccaacctggaatctatcctgagctaccccaaggacttcacctgtgtgcaccaggccctgaagggcttcaccaccaagggggtgacctctgtgagccagatcttccacagccctgacctggccatcagggatacttttgtgaatgccagcagaaccctgtactcttctagccccagggtgctgagcaataattctgatgctaacctggagctgatcaatacctgggtggctaagaataccaacaacaagattagcaggctgctggactctctgccttctgataccaggctggtgctgctgaatgccatttacctgtctgccaagtggaagaccacttttgaccctaagaagactaggatggagcctttccacttcaagaactctgtcattaaggtgcccatgatgaacagcaagaagtatcctgtggcccactttattgaccagactctgaaggccaaggtgggccagcttcagctgagccataacctgagcctggtgatcctggtgccccagaacctgaagcataggctggaggacatggagcaggctctgagcccctctgtgttcaaggctattatggagaagctggagatgagcaagttccagcccactctgctgaccctgcccagaatcaaggtgaccacctctcaggacatgctgagcatcatggaaaagctggagttctttgacttttcttatgacctgaatctgtgtggcctgactgaggatcctgatcttcaggtgtctgccatgcagcaccagactgtgctggagctgactgagactggggtggaggctgctgctgcttctgccatctctgtggccaggaccctgctggtgtttgaggtgcagcagcccttcctgtttgtgctgtgggaccagcagcacaagtttcctgtgttcatgggcagggtgtatgaccccagagcctgaagatctagagctgaattccttcagccagggggatcagcct

SEQ ID NO: 143 - DNA, 1281 bp, Artificial Sequence
  SERPING1_delta76
atggcctccaggctgaccctgctgaccctcctgctgctgctgctggctggggatagagcctcctcaaatcccaccatccaacccacccaaccaactacccagctcccaacagattctcctacccagcccactactgggtccttctgcccaggacctgttactctctgctctgacttggagagtcattcaacagaggccgtgttgggggatgctttggtagatttctccctgaagctctaccacgccttctcagcaatgaagaaggtggagaccaacatggccttttccccattcagcatcgccagcctccttacccaggtcctgctcggggctggggagaacaccaaaacaaacctggagagcatcctctcttaccccaaggacttcacctgtgtccaccaggccctgaagggcttcacgaccaaaggtgtcacctcagtctctcagattttccacagcccagacctggccataagggacacctttgtgaatgcctctcggaccctgtacagcagcagccccagagtcctaagcaacaacagtgacgccaacttggagctcatcaacacctgggtggccaagaacaccaacaacaagatcagccggctgctagacagtctgccctccgatacccgccttgtcctcctcaatgctatctacctgagtgccaagtggaagacaacatttgatcccaagaaaaccagaatggaaccctttcacttcaaaaactcagttataaaagtgcccatgatgaatagcaagaagtaccctgtggcccatttcattgaccaaactttgaaagccaaggtggggcagctgcagctctcccacaatctgagtttggtgatcctggtaccccagaacctgaaacatcgtcttgaagacatggaacaggctctcagcccttctgttttcaaggccatcatggagaaactggagatgtccaagttccagcccactctcctaacactaccccgcatcaaagtgacgaccagccaggatatgctctcaatcatggagaaattggaattcttcgatttttcttatgaccttaacctgtgtgggctgacagaggaccctgatcttcaggtttctgcgatgcagcaccagacagtgctggaactgacagagactggggtggaggcggctgcagcctccgccatctctgtggcccgcaccctgctggtctttgaagtgcagcagcccttcctcttcgtgctctgggaccagcagcacaagttccctgtcttcatggggcgagtatatgaccccagggcctga

SEQ ID NO: 144 - DNA, 1215 bp, Artificial Sequence
  SERPING1_delta98
atggcctccaggctgaccctgctgaccctcctgctgctgctgctggctggggatagagcctcctcaaatgggtccttctgcccaggacctgttactctctgctctgacttggagagtcattcaacagaggccgtgttgggggatgctttggtagatttctccctgaagctctaccacgccttctcagcaatgaagaaggtggagaccaacatggccttttccccattcagcatcgccagcctccttacccaggtcctgctcggggctggggagaacaccaaaacaaacctggagagcatcctctcttaccccaaggacttcacctgtgtccaccaggccctgaagggcttcacgaccaaaggtgtcacctcagtctctcagattttccacagcccagacctggccataagggacacctttgtgaatgcctctcggaccctgtacagcagcagccccagagtcctaagcaacaacagtgacgccaacttggagctcatcaacacctgggtggccaagaacaccaacaacaagatcagccggctgctagacagtctgccctccgatacccgccttgtcctcctcaatgctatctacctgagtgccaagtggaagacaacatttgatcccaagaaaaccagaatggaaccctttcacttcaaaaactcagttataaaagtgcccatgatgaatagcaagaagtaccctgtggcccatttcattgaccaaactttgaaagccaaggtggggcagctgcagctctcccacaatctgagtttggtgatcctggtaccccagaacctgaaacatcgtcttgaagacatggaacaggctctcagcccttctgttttcaaggccatcatggagaaactggagatgtccaagttccagcccactctcctaacactaccccgcatcaaagtgacgaccagccaggatatgctctcaatcatggagaaattggaattcttcgatttttcttatgaccttaacctgtgtgggctgacagaggaccctgatcttcaggtttctgcgatgcagcaccagacagtgctggaactgacagagactggggtggaggcggctgcagcctccgccatctctgtggcccgcaccctgctggtctttgaagtgcagcagcccttcctcttcgtgctctgggaccagcagcacaagttccctgtcttcatggggcgagtatatgaccccagggcctga

SEQ ID NO: 145 - DNA, 3608 bp, Artificial Sequence
  SERPING1co21(Intron 1-2, 2-3)
gtaggtttggtgctgggcaggggtggggagtagggtggaaagcatggagtgaagaggtctagggagggggtctcctcacccccgccttcctgcccgccttgatctcgggggtctctataggcttgcttccacctgggacttctgcctcctcctaccccagcccctcccgcctcaggcctgttgtgctcagccccccaggacctcccctcccccacgcctctggcctcattgtttggttaaagcaggaccccctccccctcccaccacctcccctccgactgaacagatggacagagacccgggcccacggggagaggaagggccagccggtgccgggaaagggaagcggtttggggaaaacaaaacagagggaggagccagggagaaggtggccccaggagggaggaggagggaattcgctaagagggactggggcctgagacggaatgggggcgggccccgggcggggtgggggcccctgggctcccagggtgggagctggctccgaggctggctggctccgcaggtccgctgacgtcgccgcccagatggcctctaggctgactctgctgactctgctgctcctgctgctggctggggtatgtggtcccttgtgggatgggggacgggggtggagacgggaggcgggatggtgcggggtgcgggcggtggctgaggattaacccttcaggctccggggaatgaggagagctcctcttgggatcattgagtgtgatccttgcacacgcactcgtagatggtggaaagagctcaggactcagacagatgcaagttctaatcttggcgggccatgtaggagctgcgcagcgtggtcctgaggacgtcacttttctcagcctactcctcctgatttataaaatgttgaataaacagatcccaccctgtccaccaagcaggcttggcaggaggatcacatagggcaaggagatgggaagcattttgtgatatcaaagcaagagtttgttgtagaaaagagctgtggggaggagaggtttggctgctgtgacacagacggtggtcccaggctagggcctgtgaagacagggaagaatggtagcaaacatacgtgggtctgggtgggggtcaatagcagtgagaggtcccagtggtctgggaggtcatggactagaaataaggctaagaagtgcaggatcccaggagaaaggtaggtaggggtgtgtgtatgtgcgtgtgtgtgtgtgtgcacgcgcaagttggtatcacatactcagcagatgatgtagttatgagcagggagtttggaatcagagaccttgttttgacccctagctgtttctcccatttctgtgagaccctggactagttaatatgtgtcggtatgagtttctctacctgtgaaatggagctaatgcgtggtttctcagtggaggatctgttgacattggggctggataattcattgctgaggggctaccctgcgcattttaggatgttttgcagtatatctctagcctctacgcactagattccggtagcatcttccctgctgtctccctgtgacaaccaaaaatgtctctggacattgccaaatatcccctgggagtcaaaattgtttcagagccgctggcctatactacttctctctccctcccttcctgcctcccttctttcctccttccctttcttcgttcccttcctaatgtgtactgtttttccacacccactaatgggttgcaacccacagtttaaaaatttactgttctaaatcaaggagcacaagttcaaatgtctgtactagccaagcaagtgagtcaaacaggtagatatttacaggaaattgcaagaacatagataaatgacaacactcagcttcactgtttggaaaacaacttcctacagggcagtaattggtcagagattacagagtccctgactatccctcatcttctgcagagcacattcctgtgcacccccaccctcaccctgtattgccccttctctgaggaattagtggtggtggttctaagacagattgctcatctgccgcactgtcagaaattactctcttgtacaggacattttccacatccacaccttctcttcctgctttgagtattttagaggactgtgcctcgtagtaagaaaaaaatgaaactcagtttcttgaaccacaggacagggccagctctaaccccaatgctacttctagctcctctcaggaccctgagagcctgcaggacaggggggagggcaaggtggccaccactgtgatctctaagatgctgtttgtggagcccatcctggaggtgagcagcctgcccaccaccaacagcaccaccaactctgccactaagatcactgccaacaccactgatgagcccaccacccagcccactactgagcccaccacccagcctactatccagcccacccagcccactacccagctgcccactgacagccctacccagcccaccactggcagcttctgccctgggcctgtgaccctgtgctctgacctggagagccattctactgaggctgtgctgggggatgccctggtggacttctctctgaagctgtaccatgctttctctgccatgaagaaggtggagactaacatggcttttagccccttcagcattgctagcctgctgacccaggtgctgctgggggctggggagaacactaagaccaacctggaatctatcctgagctaccccaaggacttcacctgtgtgcaccaggccctgaagggcttcaccaccaagggggtgacctctgtgagccagatcttccacagccctgacctggccatcagggatacttttgtgaatgccagcagaaccctgtactcttctagccccagggtgctgagcaataattctgatgctaacctggagctgatcaatacctgggtggctaagaataccaacaacaagattagcaggctgctggactctctgccttctgataccaggctggtgctgctgaatgccatttacctgtctgccaagtggaagaccacttttgaccctaagaagactaggatggagcctttccacttcaagaactctgtcattaaggtgcccatgatgaacagcaagaagtatcctgtggcccactttattgaccagactctgaaggccaaggtgggccagctgcagctgagccataacctgagcctggtgatcctggtgccccagaacctgaagcataggctggaggacatggagcaggctctgagcccctctgtgttcaaggctattatggagaagctggagatgagcaagttccagcccactctgctgaccctgcccagaatcaaggtgaccacctctcaggacatgctgagcatcatggaaaagctggagttctttgacttttcttatgacctgaatctgtgtggcctgactgaggatcctgatctgcaggtgtctgccatgcagcaccagactgtgctggagctgactgagactggggtggaggctgctgctgcttctgccatctctgtggccaggaccctgctggtgtttgaggtgcagcagcccttcctgtttgtgctgtgggaccagcagcacaagtttcctgtgttcatgggcagggtgtatgaccccagagcctga

SEQ ID NO: 146 - DNA, 3060 bp, Artificial Sequence
  SERPING1co21(Intron 2-3)
atggcctctaggctgactctgctgactctgctgctcctgctgctggctggggtatgtggtcccttgtgggatgggggacgggggtggagacgggaggcgggatggtgcggggtgcgggcggtggctgaggattaacccttcaggctccggggaatgaggagagctcctcttgggatcattgagtgtgatccttgcacacgcactcgtagatggtggaaagagctcaggactcagacagatgcaagttctaatcttggcgggccatgtaggagctgcgcagcgtggtcctgaggacgtcacttttctcagcctactcctcctgatttataaaatgttgaataaacagatcccaccctgtccaccaagcaggcttggcaggaggatcacatagggcaaggagatgggaagcattttgtgatatcaaagcaagagtttgttgtagaaaagagctgtggggaggagaggtttggctgctgtgacacagacggtggtcccaggctagggcctgtgaagacagggaagaatggtagcaaacatacgtgggtctgggtgggggtcaatagcagtgagaggtcccagtggtctgggaggtcatggactagaaataaggctaagaagtgcaggatcccaggagaaaggtaggtaggggtgtgtgtatgtgcgtgtgtgtgtgtgtgcacgcgcaagttggtatcacatactcagcagatgatgtagttatgagcagggagtttggaatcagagaccttgttttgacccctagctgtttctcccatttctgtgagaccctggactagttaatatgtgtcggtatgagtttctctacctgtgaaatggagctaatgcgtggtttctcagtggaggatctgttgacattggggctggataattcattgctgaggggctaccctgcgcattttaggatgttttgcagtatatctctagcctctacgcactagattccggtagcatcttccctgctgtctccctgtgacaaccaaaaatgtctctggacattgccaaatatcccctgggagtcaaaattgtttcagagccgctggcctatactacttctctctccctcccttcctgcctcccttctttcctccttccctttcttcgttcccttcctaatgtgtactgtttttccacacccactaatgggttgcaacccacagtttaaaaatttactgttctaaatcaaggagcacaagttcaaatgtctgtactagccaagcaagtgagtcaaacaggtagatatttacaggaaattgcaagaacatagataaatgacaacactcagcttcactgtttggaaaacaacttcctacagggcagtaattggtcagagattacagagtccctgactatccctcatcttctgcagagcacattcctgtgcacccccaccctcaccctgtattgccccttctctgaggaattagtggtggtggttctaagacagattgctcatctgccgcactgtcagaaattactctcttgtacaggacattttccacatccacaccttctcttcctgctttgagtattttagaggactgtgcctcgtagtaagaaaaaaatgaaactcagtttcttgaaccacaggacagggccagctctaaccccaatgctacttctagctcctctcaggaccctgagagcctgcaggacaggggggagggcaaggtggccaccactgtgatctctaagatgctgtttgtggagcccatcctggaggtgagcagcctgcccaccaccaacagcaccaccaactctgccactaagatcactgccaacaccactgatgagcccaccacccagcccactactgagcccaccacccagcctactatccagcccacccagcccactacccagctgcccactgacagccctacccagcccaccactggcagcttctgccctgggcctgtgaccctgtgctctgacctggagagccattctactgaggctgtgctgggggatgccctggtggacttctctctgaagctgtaccatgctttctctgccatgaagaaggtggagactaacatggcttttagccccttcagcattgctagcctgctgacccaggtgctgctgggggctggggagaacactaagaccaacctggaatctatcctgagctaccccaaggacttcacctgtgtgcaccaggccctgaagggcttcaccaccaagggggtgacctctgtgagccagatcttccacagccctgacctggccatcagggatacttttgtgaatgccagcagaaccctgtactcttctagccccagggtgctgagcaataattctgatgctaacctggagctgatcaatacctgggtggctaagaataccaacaacaagattagcaggctgctggactctctgccttctgataccaggctggtgctgctgaatgccatttacctgtctgccaagtggaagaccacttttgaccctaagaagactaggatggagcctttccacttcaagaactctgtcattaaggtgcccatgatgaacagcaagaagtatcctgtggcccactttattgaccagactctgaaggccaaggtgggccagctgcagctgagccataacctgagcctggtgatcctggtgccccagaacctgaagcataggctggaggacatggagcaggctctgagcccctctgtgttcaaggctattatggagaagctggagatgagcaagttccagcccactctgctgaccctgcccagaatcaaggtgaccacctctcaggacatgctgagcatcatggaaaagctggagttctttgacttttcttatgacctgaatctgtgtggcctgactgaggatcctgatctgcaggtgtctgccatgcagcaccagactgtgctggagctgactgagactggggtggaggctgctgctgcttctgccatctctgtggccaggaccctgctggtgtttgaggtgcagcagcccttcctgtttgtgctgtgggaccagcagcacaagtttcctgtgttcatgggcagggtgtatgaccccagagcctga

SEQ ID NO: 147 - DNA, 3160 bp, Artificial Sequence
  SERPING1co21(Intron 3-4)
atggcctctaggctgactctgctgactctgctgctcctgctgctggctggggacagggccagctctaaccccaatgctacttctagctcctctcaggaccctgagagcctgcaggacaggggggagggcaaggtggccaccactgtgatctctaagatgctgtttgtggagcccatcctggaggtgagcagcctgcccaccaccaacagcaccaccaactctgccactaagatcactgccaacaccactgatgagcccaccacccagcccactactgagcccaccacccagcctactatccagcccacccagcccactacccagctgcccactgacagccctacccagcccaccactggcagcttctgccctgggcctgtgaccctgtgctctgacctggagagccattctactgaggctgtgctgggggatgccctggtggacttctctctgaagctgtaccatgctttctctgccatgaagaaggtggagactaacatggcttttagccccttcagcattgctagcctgctgacccaggtgctgctgggtaagaccctgcttgaattctctccaggtcatttgttggacactcccataagagtcaccaatccagacacttacaaagccatgcctctgggaagaagctgtaaaaatgggctattatatattgggggtggggtagagggatgtatcttttcattcttgaacattccatcatttcacagtgatgtaataggcacgattgcttgtaaaactctgtgactatacaagaacatataaaataaggtcgcagccactaaccatgtttcatggcaaggagaggtgataagaaagatgaaattaggcgcagtggctcacgcctgtaatcccagcactttgggaggccaaggcgggtggatcacctgaggtcaggagttcaagaccagcctggccaacatggtgaaaccctgtctctactaaaaatacaaaaattatcagggagtggtggtgcatgcctgtaatcccagctacttgggcagctgaggcaggagaatcgcttgaacccaggaggtggaggttgcagtgagccgagaccgcaccattgcactacagtctgggtgacagagcgagactctgtctcaaaaaaaaaaaaaaattatcagagatagacctagagtagatgtggttagtactgccttctagctctgtgaccttgggcagatcactttaacctctctgagccttgagtcctcttgtgtaaaatagtgatgatgctatctacctcaaaagattaagaagcagaaagccaggccggatgcggtggttcacacctgtaatcccagcattttaggaggccgaggcgggcagatcacgaggtcaggagttcgagaccagcctgactaacatggtgaaaccccgtctctactaaaaataaaaagaaattagctaggcatggtggtgcacacctgtaaccccagctactcaggaggctgaggcaggagaatcacttgaacacgggaggcagaggttgcagtgagccgaaatcatgccactgcactccagcctgggaagactgagcaagactctgtctcaaaaaaaaaaaagaagcagcctagtgtctgacttagtgggaggtcaaaaaaatgtaaatcctctgccatcttgagggattactgtcaagtcccatttggtaattaccctaggaatggcacaaacaaattactacaagcagtggggacagagctattactccccagagagaattctaaaaaggctacagaatctttcttggctgggcacggtgactcacacctataatcctggcactttgggaggccaaggcaggagttcaagaccagcctggccaacatgttgaaaccccatctctactaaaaatgcaaaaattagccaggcatagtgatgcatgcttattgtcccagctacttgggaggcagaggtgggaggattgcttgaacctggagattcaagtgagctgagattgcaccactgcattccagcctgggcaacaaagcaagactctgtctcaaaaaaaaaaaaaaaaaaaaaaaaaagagagattgagagaacacttccagctcagatgatctgtgatcccctccaaagcagggaataccctccattccagcctggtccccaaccctcattcccaaggaaggcccccgactcatcctgcaagtatctttcatctctgccctttgttgcaggggctggggagaacactaagaccaacctggaatctatcctgagctaccccaaggacttcacctgtgtgcaccaggccctgaagggcttcaccaccaagggggtgacctctgtgagccagatcttccacagccctgacctggccatcagggatacttttgtgaatgccagcagaaccctgtactcttctagccccagggtgctgagcaataattctgatgctaacctggagctgatcaatacctgggtggctaagaataccaacaacaagattagcaggctgctggactctctgccttctgataccaggctggtgctgctgaatgccatttacctgtctgccaagtggaagaccacttttgaccctaagaagactaggatggagcctttccacttcaagaactctgtcattaaggtgcccatgatgaacagcaagaagtatcctgtggcccactttattgaccagactctgaaggccaaggtgggccagctgcagctgagccataacctgagcctggtgatcctggtgccccagaacctgaagcataggctggaggacatggagcaggctctgagcccctctgtgttcaaggctattatggagaagctggagatgagcaagttccagcccactctgctgaccctgcccagaatcaaggtgaccacctctcaggacatgctgagcatcatggaaaagctggagttctttgacttttcttatgacctgaatctgtgtggcctgactgaggatcctgatctgcaggtgtctgccatgcagcaccagactgtgctggagctgactgagactggggtggaggctgctgctgcttctgccatctctgtggccaggaccctgctggtgtttgaggtgcagcagcccttcctgtttgtgctgtgggaccagcagcacaagtttcctgtgttcatgggcagggtgtatgaccccagagcctga

SEQ ID NO: 148 - DNA, 38 bp, Artificial Sequence
  SERPING1_Exon1
agtctgcactggagctgcctggtgaccagaagtttgga

SEQ ID NO: 149 - DNA, 548 bp, Artificial Sequence
  SERPING1_Intron1
gtaggtttggtgctgggcaggggtggggagtagggtggaaagcatggagtgaagaggtctagggagggggtctcctcacccccgccttcctgcccgccttgatctcgggggtctctataggcttgcttccacctgggacttctgcctcctcctaccccagcccctcccgcctcaggcctgttgtgctcagccccccaggacctcccctcccccacgcctctggcctcattgtttggttaaagcaggaccccctccccctcccaccacctcccctccgactgaacagatggacagagacccgggcccacggggagaggaagggccagccggtgccgggaaagggaagcggtttggggaaaacaaaacagagggaggagccagggagaaggtggccccaggagggaggaggagggaattcgctaagagggactggggcctgagacggaatgggggcgggccccgggcggggtgggggcccctgggctcccagggtgggagctggctccgaggctggctggctccgcaggtccgctgacgtcgccgcccag

SEQ ID NO: 150 - DNA, 1557 bp, Artificial Sequence
  SERPING1_Intron2
gtatgtggtcccttgtgggatgggggacgggggtggagacgggaggcgggatggtgcggggtgcgggcggtggctgaggattaacccttcaggctccggggaatgaggagagctcctcttgggatcattgagtgtgatccttgcacacgcactcgtagatggtggaaagagctcaggactcagacagatgcaagttctaatcttggcgggccatgtaggagctgcgcagcgtggtcctgaggacgtcacttttctcagcctactcctcctgatttataaaatgttgaataaacagatcccaccctgtccaccaagcaggcttggcaggaggatcacatagggcaaggagatgggaagcattttgtgatatcaaagcaagagtttgttgtagaaaagagctgtggggaggagaggtttggctgctgtgacacagacggtggtcccaggctagggcctgtgaagacagggaagaatggtagcaaacatacgtgggtctgggtgggggtcaatagcagtgagaggtcccagtggtctgggaggtcatggactagaaataaggctaagaagtgcaggatcccaggagaaaggtaggtaggggtgtgtgtatgtgcgtgtgtgtgtgtgtgcacgcgcaagttggtatcacatactcagcagatgatgtagttatgagcagggagtttggaatcagagaccttgttttgacccctagctgtttctcccatttctgtgagaccctggactagttaatatgtgtcggtatgagtttctctacctgtgaaatggagctaatgcgtggtttctcagtggaggatctgttgacattggggctggataattcattgctgaggggctaccctgcgcattttaggatgttttgcagtatatctctagcctctacgcactagattccggtagcatcttccctgctgtctccctgtgacaaccaaaaatgtctctggacattgccaaatatcccctgggagtcaaaattgtttcagagccgctggcctatactacttctctctccctcccttcctgcctcccttctttcctccttccctttcttcgttcccttcctaatgtgtactgtttttccacacccactaatgggttgcaacccacagtttaaaaatttactgttctaaatcaaggagcacaagttcaaatgtctgtactagccaagcaagtgagtcaaacaggtagatatttacaggaaattgcaagaacatagataaatgacaacactcagcttcactgtttggaaaacaacttcctacagggcagtaattggtcagagattacagagtccctgactatccctcatcttctgcagagcacattcctgtgcacccccaccctcaccctgtattgccccttctctgaggaattagtggtggtggttctaagacagattgctcatctgccgcactgtcagaaattactctcttgtacaggacattttccacatccacaccttctcttcctgctttgagtattttagaggactgtgcctcgtagtaagaaaaaaatgaaactcagtttcttgaaccacag

SEQ ID NO: 151 - DNA, 959 bp, Artificial Sequence
  SERPING1_Intron2(-LINE/SINE)
gtatgtggtcccttgtgggatgggggacgggggtggagacgggaggcgggatggtgcggggtgcgggcggtggctgaggattaacccttcaggctccggggaatgaggagagctcctcttgggatcattgagtgtgatccttgcacacgcactcgtagatgtatcaaagcaagagtttgttgtagaaaagagctgtggggaggagaggtttggctgctgtgacacagacggtggtcccaggctagggcctgtgaagacagggaagaatggtagcaaacatacgtgggtctgggtgggggtcaatagcagtgagaggtcccagtggtctgggaggtcatggactagaaataaggctaagaagtgcaggatcccaggagaaaggtaggtaggggtgtgtgtatgtgcgtgtgtgtgtgtgtgcacgcgcaagttggtatcacatactcagcgtgcctatactacttctctctccctcccttcctgcctcccttctttcctccttccctttcttcgttcccttcctaatgtgtactgttttttactgttctaaatcaaggagcacaagttcaaatgtctgtactagccaagcaagtgagtcaaacaggtagatatttacaggaaattgcaagaacatagataaatgacaacactcagcttcactgtttggaaaacaacttcctacagggcagtaattggtcagagattacagagtccctgactatccctcatcttctgcagagcacattcctgtgcacccccaccctcaccctgtattgccccttctctgaggaattagtggtggtggttctaagacagattgctcatctgccgcactgtcagaaattactctcttgtacaggacattttccacatccacaccttctcttcctgctttgagtattttagaggactgtgcctcgtagtaagaaaaaaatgaaactcagtttcttgaaccacag

SEQ ID NO: 152 - DNA, 959 bp, Artificial Sequence
  SERPING1_Intron2(-LINE/SINE, -CpG)
gtatgtggtcccttgtgggatgggggactggggtggagaggggaggcaggatggtggggggtgcctggggtggctgaggattaacccttcaggctggggggaatgaggagagctcctcttgggatcattgagtgtgatccttgcacaggcactggtagatgtatcaaagcaagagtttgttgtagaaaagagctgtggggaggagaggtttggctgctgtgacacagagggtggtcccaggctagggcctgtgaagacagggaagaatggtagcaaacataggtgggtctgggtgggggtcaatagcagtgagaggtcccagtggtctgggaggtcatggactagaaataaggctaagaagtgcaggatcccaggagaaaggtaggtaggggtgtgtgtatgtgggtgtgtgtgtgtgtgcacccccaagttggtatcacatactcagcctgcctatactacttctctctccctcccttcctgcctcccttctttcctccttccctttcttccttcccttcctaatgtgtactgttttttactgttctaaatcaaggagcacaagttcaaatgtctgtactagccaagcaagtgagtcaaacaggtagatatttacaggaaattgcaagaacatagataaatgacaacactcagcttcactgtttggaaaacaacttcctacagggcagtaattggtcagagattacagagtccctgactatccctcatcttctgcagagcacattcctgtgcacccccaccctcaccctgtattgccccttctctgaggaattagtggtggtggttctaagacagattgctcatctgccccactgtcagaaattactctcttgtacaggacattttccacatccacaccttctcttcctgctttgagtattttagaggactgtgcctgctagtaagaaaaaaatgaaactcagtttcttgaaccacag

SEQ ID NO: 153 - DNA, 1657 bp, Artificial Sequence
  SERPING1_Intron3
gtaagaccctgcttgaattctctccaggtcatttgttggacactcccataagagtcaccaatccagacacttacaaagccatgcctctgggaagaagctgtaaaaatgggctattatatattgggggtggggtagagggatgtatcttttcattcttgaacattccatcatttcacagtgatgtaataggcacgattgcttgtaaaactctgtgactatacaagaacatataaaataaggtcgcagccactaaccatgtttcatggcaaggagaggtgataagaaagatgaaattaggcgcagtggctcacgcctgtaatcccagcactttgggaggccaaggcgggtggatcacctgaggtcaggagttcaagaccagcctggccaacatggtgaaaccctgtctctactaaaaatacaaaaattatcagggagtggtggtgcatgcctgtaatcccagctacttgggcagctgaggcaggagaatcgcttgaacccaggaggtggaggttgcagtgagccgagaccgcaccattgcactacagtctgggtgacagagcgagactctgtctcaaaaaaaaaaaaaaattatcagagatagacctagagtagatgtggttagtactgccttctagctctgtgaccttgggcagatcactttaacctctctgagccttgagtcctcttgtgtaaaatagtgatgatgctatctacctcaaaagattaagaagcagaaagccaggccggatgcggtggttcacacctgtaatcccagcattttaggaggccgaggcgggcagatcacgaggtcaggagttcgagaccagcctgactaacatggtgaaaccccgtctctactaaaaataaaaagaaattagctaggcatggtggtgcacacctgtaaccccagctactcaggaggctgaggcaggagaatcacttgaacacgggaggcagaggttgcagtgagccgaaatcatgccactgcactccagcctgggaagactgagcaagactctgtctcaaaaaaaaaaaagaagcagcctagtgtctgacttagtgggaggtcaaaaaaatgtaaatcctctgccatcttgagggattactgtcaagtcccatttggtaattaccctaggaatggcacaaacaaattactacaagcagtggggacagagctattactccccagagagaattctaaaaaggctacagaatctttcttggctgggcacggtgactcacacctataatcctggcactttgggaggccaaggcaggagttcaagaccagcctggccaacatgttgaaaccccatctctactaaaaatgcaaaaattagccaggcatagtgatgcatgcttattgtcccagctacttgggaggcagaggtgggaggattgcttgaacctggagattcaagtgagctgagattgcaccactgcattccagcctgggcaacaaagcaagactctgtctcaaaaaaaaaaaaaaaaaaaaaaaaaagagagattgagagaacacttccagctcagatgatctgtgatcccctccaaagcagggaataccctccattccagcctggtccccaaccctcattcccaaggaaggcccccgactcatcctgcaagtatctttcatctctgccctttgttgcag

SEQ ID NO: 154 - DNA, 655 bp, Artificial Sequence
  SERPING1_Intron3(-LINE/SINE)
gtaagaccctgcttgaattctctccaggtcatttgttggacactcccataagagtcaccaatccagacacttacaaagccatgcctctgggaagaagctgtaaaaatgggctattatatattgggggtggggtagagggatgtatcttttcattcttgaacattccatcatttcacagtgatgtaataggcacgattgcttgtaaaactctgtgactatacaagaacatataaaataaggtcgcagccactaaccatgtttcatggcaaggagaggtgataagaaagatgaaattattatcagaagaagcagaaagccagcagcctagtgtctgacttagtgggaggtcaaaaaaatgtaaatcctctgccatcttgagggattactgtcaagtcccatttggtaattaccctaggaatggcacaaacaaattactacaagcagtggggacagagctattactccccagagagaattctaaaaaggctacagaatctttcttgagagattgagagaacacttccagctcagatgatctgtgatcccctccaaagcagggaataccctccattccagcctggtccccaaccctcattcccaaggaaggcccccgactcatcctgcaagtatctttcatctctgccctttgttgcag

SEQ ID NO: 155 - DNA, 655 bp, Artificial Sequence
  SERPING1_Intron3(-LINE/SINE, -CpG)
gtaagaccctgcttgaattctctccaggtcatttgttggacactcccataagagtcaccaatccagacacttacaaagccatgcctctgggaagaagctgtaaaaatgggctattatatattgggggtggggtagagggatgtatcttttcattcttgaacattccatcatttcacagtgatgtaataggcaccattgcttgtaaaactctgtgactatacaagaacatataaaataaggtcccagccactaaccatgtttcatggcaaggagaggtgataagaaagatgaaattattatcagaagaagcagaaagccagcagcctagtgtctgacttagtgggaggtcaaaaaaatgtaaatcctctgccatcttgagggattactgtcaagtcccatttggtaattaccctaggaatggcacaaacaaattactacaagcagtggggacagagctattactccccagagagaattctaaaaaggctacagaatctttcttgagagattgagagaacacttccagctcagatgatctgtgatcccctccaaagcagggaataccctccattccagcctggtccccaaccctcattcccaaggaaggccccccactcatcctgcaagtatctttcatctctgccctttgttgcag

SEQ ID NO: 156 - DNA, 1503 bp, Artificial Sequence
  SERPING1_coI21(-ORFs)
atggcctctaggctgactctgctgactctgctgctcctgctgctggctggggacagggccagctctaaccccaatgctacttctagctcctctcaggaccctgagagcctgcaggacaggggggagggcaaggtggccaccactgtgatctctaagatgctgtttgtggagcccatcctggaggtgagcagcctgcccaccaccaacagcaccaccaactctgccactaagatcactgccaacaccactgatgagcccaccacccagcccactactgagcccaccacccagcctactatccagcccacccagcccactacccagctgcccactgacagccctacccagcccaccactggcagcttctgccctgggcctgtgaccctgtgctcagacctggagagccactctactgaggctgtgctgggggatgccctggtggacttctctctgaagctgtatcatgctttctctgccatgaagaaggtggagactaacatggcttttagccccttcagcattgctagcctgctgacccaggtgctgctgggggctggggagaacactaagaccaacctggaatctatcctgagctaccccaaggacttcacctgtgtgcaccaggccctgaagggcttcaccaccaagggggtgacctctgtgagccagatcttccacagccctgacctggccatcagggatacttttgtgaatgccagcagaaccctgtactcttctagccccagggtgctgagcaataattctgatgctaacctggagctgatcaatacctgggtggctaagaataccaacaacaagattagcaggctgctggactctctgccttctgataccaggctggtgctgctgaatgccatttacctgtctgccaagtggaagaccacttttgaccctaagaagactaggatggagcctttccacttcaagaactctgtcattaaggtgcccatgatgaacagcaagaagtatcctgtggcccactttattgaccagactctgaaggccaaggtgggccagctgcagctgagccacaacctgagcctggtgatcctggtgccccagaacctgaagcacaggctggaggacatggagcaggctctgagcccctctgtgttcaaggctattatggagaagctggagatgagcaagttccagcccactctgctgaccctgcccagaatcaaggtgaccacctctcaggacatgctgagcatcatggaaaagctggagttctttgacttttcttatgacctgaatctgtgtggcctgactgaggatcctgatctgcaggtgtctgccatgcagcaccagactgtgctggagctgactgagactggggtggaggctgctgctgcttctgccatctctgtggccaggaccctgctggtgtttgaggtgcagcagcccttcctgtttgtgctgtgggaccagcagcacaagtttcctgtgttcatgggcagggtgtatgaccccagagcctga

SEQ ID NO: 157 - DNA, 66 bp, Artificial Sequence
  P2A
ggctctggtgccaccaacttctccctgctcaagcaggcaggggatgtggaagagaatcctggaccc

SEQ ID NO: 158 - DNA, 3069 bp, Artificial Sequence
  SERPING1co21.P2A.SERPING1co24
atggcctctaggctgactctgctgactctgctgctcctgctgctggctggggacagggccagctctaaccccaatgctacttctagctcctctcaggaccctgagagcctgcaggacaggggggagggcaaggtggccaccactgtgatctctaagatgctgtttgtggagcccatcctggaggtgagcagcctgcccaccaccaacagcaccaccaactctgccactaagatcactgccaacaccactgatgagcccaccacccagcccactactgagcccaccacccagcctactatccagcccacccagcccactacccagctgcccactgacagccctacccagcccaccactggcagcttctgccctgggcctgtgaccctgtgctctgacctggagagccattctactgaggctgtgctgggggatgccctggtggacttctctctgaagctgtaccatgctttctctgccatgaagaaggtggagactaacatggcttttagccccttcagcattgctagcctgctgacccaggtgctgctgggggctggggagaacactaagaccaacctggaatctatcctgagctaccccaaggacttcacctgtgtgcaccaggccctgaagggcttcaccaccaagggggtgacctctgtgagccagatcttccacagccctgacctggccatcagggatacttttgtgaatgccagcagaaccctgtactcttctagccccagggtgctgagcaataattctgatgctaacctggagctgatcaatacctgggtggctaagaataccaacaacaagattagcaggctgctggactctctgccttctgataccaggctggtgctgctgaatgccatttacctgtctgccaagtggaagaccacttttgaccctaagaagactaggatggagcctttccacttcaagaactctgtcattaaggtgcccatgatgaacagcaagaagtatcctgtggcccactttattgaccagactctgaaggccaaggtgggccagctgcagctgagccataacctgagcctggtgatcctggtgccccagaacctgaagcataggctggaggacatggagcaggctctgagcccctctgtgttcaaggctattatggagaagctggagatgagcaagttccagcccactctgctgaccctgcccagaatcaaggtgaccacctctcaggacatgctgagcatcatggaaaagctggagttctttgacttttcttatgacctgaatctgtgtggcctgactgaggatcctgatctgcaggtgtctgccatgcagcaccagactgtgctggagctgactgagactggggtggaggctgctgctgcttctgccatctctgtggccaggaccctgctggtgtttgaggtgcagcagcccttcctgtttgtgctgtgggaccagcagcacaagtttcctgtgttcatgggcagggtgtatgaccccagagctggctctggtgccaccaacttctccctgctcaagcaggcaggggatgtggaagagaatcctggacccatggctagcaggctgaccctgctgaccctgctgctcctgctgctggctggggacagggcctctagcaatcccaatgccacctctagctctagccaggatcctgagagcctgcaggacaggggggagggcaaggtggccaccactgtgatcagcaagatgctgtttgtggagcccattctggaggtgtcttctctgcccaccaccaatagcaccactaattctgccaccaagatcactgctaacaccactgatgagcccaccactcagcctaccactgagcccaccacccagcccactatccagcccacccagcccaccacccagctgcctactgacagccctacccagcccactactgggagcttctgccctggccctgtgaccctgtgctctgacctggagagccacagcactgaggctgtgctgggggatgccctggtggacttcagcctgaagctgtaccatgccttttctgccatgaagaaggtggagaccaacatggcctttagccctttcagcattgccagcctgctgactcaggtgctgctgggggctggggagaacaccaagaccaacctggagagcatcctgagctaccccaaggacttcacttgtgtgcaccaggccctgaagggcttcactaccaagggggtgacttctgtgagccagatcttccacagccctgacctggccatcagggatacttttgtgaatgccagcaggaccctgtacagcagcagccccagggtgctgagcaacaactctgatgctaacctggagctgatcaatacttgggtggccaagaacaccaacaacaagatttctaggctgctggactctctgccctctgacactaggctggtgctgctgaatgccatctacctgtctgccaagtggaagaccacctttgatcccaagaagactaggatggagcccttccacttcaagaactctgtgatcaaggtgcccatgatgaacagcaagaagtaccctgtggcccatttcattgaccagaccctgaaggccaaggtggggcagctgcagctgagccacaatctgagcctggtgattctggtgccccagaatctgaagcacagactggaggacatggagcaggctctgtctccctctgtgttcaaggccatcatggagaagctggagatgagcaagttccagcccactctgctgactctgcctaggatcaaggtgaccaccagccaggacatgctgagcattatggagaagctggagttctttgacttcagctatgacctgaacctgtgtggcctgactgaggaccctgatctgcaggtgtctgccatgcagcaccagactgtgctggagctgactgagactggggtggaggctgctgctgcctctgctatttctgtggccaggaccctgctggtgtttgaggtgcagcagcccttcctgtttgtgctgtgggaccagcagcacaagtttcctgtgttcatggggagggtgtatgaccccagggcctga

SEQ ID NO: 159 - DNA, 678 bp, Artificial Sequence
  Fc(WT)
gacaaaactcacacatgcccaccgtgcccagcacctgaactcctggggggaccgtcagtcttcctcttccccccaaaacccaaggacaccctcatgatctcccggacccctgaggtcacatgcgtggtggtggacgtgagccacgaagaccctgaggtcaagttcaactggtacgtggacggcgtggaggtgcataatgccaagacaaagccgcgggaggagcagtacaacagcacgtaccgtgtggtcagcgtcctcaccgtcctgcaccaggactggctgaatggcaaggagtacaagtgcaaggtctccaacaaagccctcccagcccccatcgagaaaaccatctccaaagccaaagggcagccccgagaaccacaggtgtacaccctgcccccatcccgggatgagctgaccaagaaccaggtcagcctgacctgcctggtcaaaggcttctatcccagcgacatcgccgtggagtgggagagcaatgggcagccggagaacaactacaagaccacgcctcccgtgctggactccgacggctccttcttcctctacagcaagctcaccgtggacaagagcaggtggcagcaggggaacgtcttctcatgctccgtgatgcatgaggctctgcacaaccactacacgcagaagagcctctccctgtctccgggt

SEQ ID NO: 160 - DNA, 678 bp, Artificial Sequence
  Fc(Ishino)
gacaaaactcacacatgcccaccgtgcccagcacctgaactcctggggggaccgtcagtcttcctcttccccccaaaacccaaggacaccctcatgatctcccggacccctgaggtcacatgcgtggtggtggacgtgagccacgaagaccctgaggtcaagttcaactggtacgtggacggcgtggaggtgcataatgccaagacaaagccgcgggaggagcagtacaacagcacgtaccgtgtggtcagcgtcctcaccgtcctgcaccaggactggctgaatggcaaggagtacaagtgcaaggtctccaacaaagccctcccagcccccatcgagaaaaccatctccaaagccaaagggcagccccgagaaccacaggtgtacaccctgcccccatcccgggatgagctgaccaagaaccaggtcaatctgacctgcctggtcaaaggcttctatcccagcgacatcgccgtggagtgggagagcaatgggcagccggagaacaactacaagaccacgcctcccgtgctggactccgacggctccttcttcctcaatagcaagctcaccgtggacaagagcaggtggcagcaggggaacgtcttctcatgctccgtgatgcatgaggctctgcacaaccactacacgcagaagagcctctccctgtctccgggt

SEQ ID NO: 161 - DNA, 678 bp, Artificial Sequence
  Fc(Ying)
gacaaaactcacacatgcccaccgtgcccagcacctgaactcctggggggaccgtcagtcttcctcttccccccaaaacccaaggacaccctcatgatctcccggacccctgaggtcacatgcgtggtggtggacgtgagccacgaagaccctgaggtcaagttcaactggtacgtggacggcgtggaggtgcataatgccaagacaaagccgcgggaggagcagtacaacagcacgtaccgtgtggtcagcgtcctcaccgtcctgcaccaggactggctgaatggcaaggagtacaagtgcaaggtctccaacaaagccctcccagcccccatcgagaaaaccatctccaaagccaaagggcagccccgagaaccacaggtgtacaccaagcccccatcccgggatgagctgaccaagaaccaggtcagcctgagctgcctggtcaaaggcttctatcccagcgacatcgccgtggagtgggagagcaatgggcagccggagaacaactacaagaccacggtgcccgtgctggactccgacggctccttcagactcgccagctacctcaccgtggacaagagcaggtggcagcaggggaacgtcttctcatgctccgtgatgcatgaggctctgcacaaccactacacgcagaagagcctctccctgtctccgggt

SEQ ID NO: 162 - DNA, 678 bp, Artificial Sequence
  Fc(YTE)
gacaaaactcacacatgcccaccgtgcccagcacctgaactcctggggggaccgtcagtcttcctcttccccccaaaacccaaggacaccctctacatcacccgggagcctgaggtcacatgcgtggtggtggacgtgagccacgaagaccctgaggtcaagttcaactggtacgtggacggcgtggaggtgcataatgccaagacaaagccgcgggaggagcagtacaacagcacgtaccgtgtggtcagcgtcctcaccgtcctgcaccaggactggctgaatggcaaggagtacaagtgcaaggtctccaacaaagccctcccagcccccatcgagaaaaccatctccaaagccaaagggcagccccgagaaccacaggtgtacaccctgcccccatcccgggatgagctgaccaagaaccaggtcagcctgacctgcctggtcaaaggcttctatcccagcgacatcgccgtggagtgggagagcaatgggcagccggagaacaactacaagaccacgcctcccgtgctggactccgacggctccttcttcctctacagcaagctcaccgtggacaagagcaggtggcagcaggggaacgtcttctcatgctccgtgatgcatgaggctctgcacaaccactacacgcagaagagcctctccctgtctccgggt

SEQ ID NO: 163 - DNA, 678 bp, Artificial Sequence
  Fc(LS)
gacaaaactcacacatgcccaccgtgcccagcacctgaactcctggggggaccgtcagtcttcctcttccccccaaaacccaaggacaccctcatgatctcccggacccctgaggtcacatgcgtggtggtggacgtgagccacgaagaccctgaggtcaagttcaactggtacgtggacggcgtggaggtgcataatgccaagacaaagccgcgggaggagcagtacaacagcacgtaccgtgtggtcagcgtcctcaccgtcctgcaccaggactggctgaatggcaaggagtacaagtgcaaggtctccaacaaagccctcccagcccccatcgagaaaaccatctccaaagccaaagggcagccccgagaaccacaggtgtacaccctgcccccatcccgggatgagctgaccaagaaccaggtcagcctgacctgcctggtcaaaggcttctatcccagcgacatcgccgtggagtgggagagcaatgggcagccggagaacaactacaagaccacgcctcccgtgctggactccgacggctccttcttcctctacagcaagctcaccgtggacaagagcaggtggcagcaggggaacgtcttctcatgctccgtgctgcatgaggctctgcacagccactacacgcagaagagcctctccctgtctccgggt

SEQ ID NO: 164 - DNA, 678 bp, Artificial Sequence
  Fc(IFL)
gacaaaactcacacatgcccaccgtgcccagcacctgaactcctggggggaccgtcagtcttcctcttccccccaaaacccaaggacaccctcatgatctcccggacccctgagatcacatgcgtggtggtggacgtgagccacgaagaccctgaggtcaagttcaactggtacgtggacggcgtggaggtgcataatgccaagacaaagccgcgggaggagcagtacaacagcacgtaccgtgtggtcagcgtcctcaccttcctgcaccaggactggctgaatggcaaggagtacaagtgcaaggtctccaacaaagccctcccagcccccatcgagaaaaccatctccaaagccaaagggcagccccgagaaccacaggtgtacaccctgcccccatcccgggatgagctgaccaagaaccaggtcagcctgacctgcctggtcaaaggcttctatcccagcgacatcgccgtggagtgggagagcaatgggcagccggagaacaactacaagaccacgcctcccgtgctggactccgacggctccttcttcctctacagcaagctcaccgtggacaagagcaggtggcagcaggggaacgtcttctcatgctccgtgctgcatgaggctctgcacaaccactacacgcagaagagcctctccctgtctccgggt

SEQ ID NO: 165 - DNA, 2178 bp, Artificial Sequence
  SERPING1.Fc
atggcctccaggctgaccctgctgaccctcctgctgctgctgctggctggggatagagcctcctcaaatccaaatgctaccagctccagctcccaggatccagagagtttgcaagacagaggcgaagggaaggtcgcaacaacagttatctccaagatgctattcgttgaacccatcctggaggtttccagcttgccgacaaccaactcaacaaccaattcagccaccaaaataacagctaataccactgatgaacccaccacacaacccaccacagagcccaccacccaacccaccatccaacccacccaaccaactacccagctcccaacagattctcctacccagcccactactgggtccttctgcccaggacctgttactctctgctctgacttggagagtcattcaacagaggccgtgttgggggatgctttggtagatttctccctgaagctctaccacgccttctcagcaatgaagaaggtggagaccaacatggccttttccccattcagcatcgccagcctccttacccaggtcctgctcggggctggggagaacaccaaaacaaacctggagagcatcctctcttaccccaaggacttcacctgtgtccaccaggccctgaagggcttcacgaccaaaggtgtcacctcagtctctcagattttccacagcccagacctggccataagggacacctttgtgaatgcctctcggaccctgtacagcagcagccccagagtcctaagcaacaacagtgacgccaacttggagctcatcaacacctgggtggccaagaacaccaacaacaagatcagccggctgctagacagtctgccctccgatacccgccttgtcctcctcaatgctatctacctgagtgccaagtggaagacaacatttgatcccaagaaaaccagaatggaaccctttcacttcaaaaactcagttataaaagtgcccatgatgaatagcaagaagtaccctgtggcccatttcattgaccaaactttgaaagccaaggtggggcagctgcagctctcccacaatctgagtttggtgatcctggtaccccagaacctgaaacatcgtcttgaagacatggaacaggctctcagcccttctgttttcaaggccatcatggagaaactggagatgtccaagttccagcccactctcctaacactaccccgcatcaaagtgacgaccagccaggatatgctctcaatcatggagaaattggaattcttcgatttttcttatgaccttaacctgtgtgggctgacagaggaccctgatcttcaggtttctgcgatgcagcaccagacagtgctggaactgacagagactggggtggaggcggctgcagcctccgccatctctgtggcccgcaccctgctggtctttgaagtgcagcagcccttcctcttcgtgctctgggaccagcagcacaagttccctgtcttcatggggcgagtatatgaccccagggccgacaaaactcacacatgcccaccgtgcccagcacctgaactcctggggggaccgtcagtcttcctcttccccccaaaacccaaggacaccctcatgatctcccggacccctgaggtcacatgcgtggtggtggacgtgagccacgaagaccctgaggtcaagttcaactggtacgtggacggcgtggaggtgcataatgccaagacaaagccgcgggaggagcagtacaacagcacgtaccgtgtggtcagcgtcctcaccgtcctgcaccaggactggctgaatggcaaggagtacaagtgcaaggtctccaacaaagccctcccagcccccatcgagaaaaccatctccaaagccaaagggcagccccgagaaccacaggtgtacaccctgcccccatcccgggatgagctgaccaagaaccaggtcagcctgacctgcctggtcaaaggcttctatcccagcgacatcgccgtggagtgggagagcaatgggcagccggagaacaactacaagaccacgcctcccgtgctggactccgacggctccttcttcctctacagcaagctcaccgtggacaagagcaggtggcagcaggggaacgtcttctcatgctccgtgatgcatgaggctctgcacaaccactacacgcagaagagcctctccctgtctccgggt

SEQ ID NO: 166 - DNA, 2178 bp, Artificial Sequence
  SERPING1.Fc(Ishino)
atggcctccaggctgaccctgctgaccctcctgctgctgctgctggctggggatagagcctcctcaaatccaaatgctaccagctccagctcccaggatccagagagtttgcaagacagaggcgaagggaaggtcgcaacaacagttatctccaagatgctattcgttgaacccatcctggaggtttccagcttgccgacaaccaactcaacaaccaattcagccaccaaaataacagctaataccactgatgaacccaccacacaacccaccacagagcccaccacccaacccaccatccaacccacccaaccaactacccagctcccaacagattctcctacccagcccactactgggtccttctgcccaggacctgttactctctgctctgacttggagagtcattcaacagaggccgtgttgggggatgctttggtagatttctccctgaagctctaccacgccttctcagcaatgaagaaggtggagaccaacatggccttttccccattcagcatcgccagcctccttacccaggtcctgctcggggctggggagaacaccaaaacaaacctggagagcatcctctcttaccccaaggacttcacctgtgtccaccaggccctgaagggcttcacgaccaaaggtgtcacctcagtctctcagattttccacagcccagacctggccataagggacacctttgtgaatgcctctcggaccctgtacagcagcagccccagagtcctaagcaacaacagtgacgccaacttggagctcatcaacacctgggtggccaagaacaccaacaacaagatcagccggctgctagacagtctgccctccgatacccgccttgtcctcctcaatgctatctacctgagtgccaagtggaagacaacatttgatcccaagaaaaccagaatggaaccctttcacttcaaaaactcagttataaaagtgcccatgatgaatagcaagaagtaccctgtggcccatttcattgaccaaactttgaaagccaaggtggggcagctgcagctctcccacaatctgagtttggtgatcctggtaccccagaacctgaaacatcgtcttgaagacatggaacaggctctcagcccttctgttttcaaggccatcatggagaaactggagatgtccaagttccagcccactctcctaacactaccccgcatcaaagtgacgaccagccaggatatgctctcaatcatggagaaattggaattcttcgatttttcttatgaccttaacctgtgtgggctgacagaggaccctgatcttcaggtttctgcgatgcagcaccagacagtgctggaactgacagagactggggtggaggcggctgcagcctccgccatctctgtggcccgcaccctgctggtctttgaagtgcagcagcccttcctcttcgtgctctgggaccagcagcacaagttccctgtcttcatggggcgagtatatgaccccagggccgacaaaactcacacatgcccaccgtgcccagcacctgaactcctggggggaccgtcagtcttcctcttccccccaaaacccaaggacaccctcatgatctcccggacccctgaggtcacatgcgtggtggtggacgtgagccacgaagaccctgaggtcaagttcaactggtacgtggacggcgtggaggtgcataatgccaagacaaagccgcgggaggagcagtacaacagcacgtaccgtgtggtcagcgtcctcaccgtcctgcaccaggactggctgaatggcaaggagtacaagtgcaaggtctccaacaaagccctcccagcccccatcgagaaaaccatctccaaagccaaagggcagccccgagaaccacaggtgtacaccctgcccccatcccgggatgagctgaccaagaaccaggtcaatctgacctgcctggtcaaaggcttctatcccagcgacatcgccgtggagtgggagagcaatgggcagccggagaacaactacaagaccacgcctcccgtgctggactccgacggctccttcttcctcaatagcaagctcaccgtggacaagagcaggtggcagcaggggaacgtcttctcatgctccgtgatgcatgaggctctgcacaaccactacacgcagaagagcctctccctgtctccgggt

SEQ ID NO: 167 - DNA, 2178 bp, Artificial Sequence
  SERPING1.Fc(Ying)
atggcctccaggctgaccctgctgaccctcctgctgctgctgctggctggggatagagcctcctcaaatccaaatgctaccagctccagctcccaggatccagagagtttgcaagacagaggcgaagggaaggtcgcaacaacagttatctccaagatgctattcgttgaacccatcctggaggtttccagcttgccgacaaccaactcaacaaccaattcagccaccaaaataacagctaataccactgatgaacccaccacacaacccaccacagagcccaccacccaacccaccatccaacccacccaaccaactacccagctcccaacagattctcctacccagcccactactgggtccttctgcccaggacctgttactctctgctctgacttggagagtcattcaacagaggccgtgttgggggatgctttggtagatttctccctgaagctctaccacgccttctcagcaatgaagaaggtggagaccaacatggccttttccccattcagcatcgccagcctccttacccaggtcctgctcggggctggggagaacaccaaaacaaacctggagagcatcctctcttaccccaaggacttcacctgtgtccaccaggccctgaagggcttcacgaccaaaggtgtcacctcagtctctcagattttccacagcccagacctggccataagggacacctttgtgaatgcctctcggaccctgtacagcagcagccccagagtcctaagcaacaacagtgacgccaacttggagctcatcaacacctgggtggccaagaacaccaacaacaagatcagccggctgctagacagtctgccctccgatacccgccttgtcctcctcaatgctatctacctgagtgccaagtggaagacaacatttgatcccaagaaaaccagaatggaaccctttcacttcaaaaactcagttataaaagtgcccatgatgaatagcaagaagtaccctgtggcccatttcattgaccaaactttgaaagccaaggtggggcagctgcagctctcccacaatctgagtttggtgatcctggtaccccagaacctgaaacatcgtcttgaagacatggaacaggctctcagcccttctgttttcaaggccatcatggagaaactggagatgtccaagttccagcccactctcctaacactaccccgcatcaaagtgacgaccagccaggatatgctctcaatcatggagaaattggaattcttcgatttttcttatgaccttaacctgtgtgggctgacagaggaccctgatcttcaggtttctgcgatgcagcaccagacagtgctggaactgacagagactggggtggaggcggctgcagcctccgccatctctgtggcccgcaccctgctggtctttgaagtgcagcagcccttcctcttcgtgctctgggaccagcagcacaagttccctgtcttcatggggcgagtatatgaccccagggccgacaaaactcacacatgcccaccgtgcccagcacctgaactcctggggggaccgtcagtcttcctcttccccccaaaacccaaggacaccctcatgatctcccggacccctgaggtcacatgcgtggtggtggacgtgagccacgaagaccctgaggtcaagttcaactggtacgtggacggcgtggaggtgcataatgccaagacaaagccgcgggaggagcagtacaacagcacgtaccgtgtggtcagcgtcctcaccgtcctgcaccaggactggctgaatggcaaggagtacaagtgcaaggtctccaacaaagccctcccagcccccatcgagaaaaccatctccaaagccaaagggcagccccgagaaccacaggtgtacaccaagcccccatcccgggatgagctgaccaagaaccaggtcagcctgagctgcctggtcaaaggcttctatcccagcgacatcgccgtggagtgggagagcaatgggcagccggagaacaactacaagaccacggtgcccgtgctggactccgacggctccttcagactcgccagctacctcaccgtggacaagagcaggtggcagcaggggaacgtcttctcatgctccgtgatgcatgaggctctgcacaaccactacacgcagaagagcctctccctgtctccgggt

SEQ ID NO: 168 - DNA, 2178 bp, Artificial Sequence
  SERPING1.Fc(YTE)
atggcctccaggctgaccctgctgaccctcctgctgctgctgctggctggggatagagcctcctcaaatccaaatgctaccagctccagctcccaggatccagagagtttgcaagacagaggcgaagggaaggtcgcaacaacagttatctccaagatgctattcgttgaacccatcctggaggtttccagcttgccgacaaccaactcaacaaccaattcagccaccaaaataacagctaataccactgatgaacccaccacacaacccaccacagagcccaccacccaacccaccatccaacccacccaaccaactacccagctcccaacagattctcctacccagcccactactgggtccttctgcccaggacctgttactctctgctctgacttggagagtcattcaacagaggccgtgttgggggatgctttggtagatttctccctgaagctctaccacgccttctcagcaatgaagaaggtggagaccaacatggccttttccccattcagcatcgccagcctccttacccaggtcctgctcggggctggggagaacaccaaaacaaacctggagagcatcctctcttaccccaaggacttcacctgtgtccaccaggccctgaagggcttcacgaccaaaggtgtcacctcagtctctcagattttccacagcccagacctggccataagggacacctttgtgaatgcctctcggaccctgtacagcagcagccccagagtcctaagcaacaacagtgacgccaacttggagctcatcaacacctgggtggccaagaacaccaacaacaagatcagccggctgctagacagtctgccctccgatacccgccttgtcctcctcaatgctatctacctgagtgccaagtggaagacaacatttgatcccaagaaaaccagaatggaaccctttcacttcaaaaactcagttataaaagtgcccatgatgaatagcaagaagtaccctgtggcccatttcattgaccaaactttgaaagccaaggtggggcagctgcagctctcccacaatctgagtttggtgatcctggtaccccagaacctgaaacatcgtcttgaagacatggaacaggctctcagcccttctgttttcaaggccatcatggagaaactggagatgtccaagttccagcccactctcctaacactaccccgcatcaaagtgacgaccagccaggatatgctctcaatcatggagaaattggaattcttcgatttttcttatgaccttaacctgtgtgggctgacagaggaccctgatcttcaggtttctgcgatgcagcaccagacagtgctggaactgacagagactggggtggaggcggctgcagcctccgccatctctgtggcccgcaccctgctggtctttgaagtgcagcagcccttcctcttcgtgctctgggaccagcagcacaagttccctgtcttcatggggcgagtatatgaccccagggccgacaaaactcacacatgcccaccgtgcccagcacctgaactcctggggggaccgtcagtcttcctcttccccccaaaacccaaggacaccctctacatcacccgggagcctgaggtcacatgcgtggtggtggacgtgagccacgaagaccctgaggtcaagttcaactggtacgtggacggcgtggaggtgcataatgccaagacaaagccgcgggaggagcagtacaacagcacgtaccgtgtggtcagcgtcctcaccgtcctgcaccaggactggctgaatggcaaggagtacaagtgcaaggtctccaacaaagccctcccagcccccatcgagaaaaccatctccaaagccaaagggcagccccgagaaccacaggtgtacaccctgcccccatcccgggatgagctgaccaagaaccaggtcagcctgacctgcctggtcaaaggcttctatcccagcgacatcgccgtggagtgggagagcaatgggcagccggagaacaactacaagaccacgcctcccgtgctggactccgacggctccttcttcctctacagcaagctcaccgtggacaagagcaggtggcagcaggggaacgtcttctcatgctccgtgatgcatgaggctctgcacaaccactacacgcagaagagcctctccctgtctccgggt

SEQ ID NO: 169 - DNA, 2178 bp, Artificial Sequence
  SERPING1.Fc(LS)
atggcctccaggctgaccctgctgaccctcctgctgctgctgctggctggggatagagcctcctcaaatccaaatgctaccagctccagctcccaggatccagagagtttgcaagacagaggcgaagggaaggtcgcaacaacagttatctccaagatgctattcgttgaacccatcctggaggtttccagcttgccgacaaccaactcaacaaccaattcagccaccaaaataacagctaataccactgatgaacccaccacacaacccaccacagagcccaccacccaacccaccatccaacccacccaaccaactacccagctcccaacagattctcctacccagcccactactgggtccttctgcccaggacctgttactctctgctctgacttggagagtcattcaacagaggccgtgttgggggatgctttggtagatttctccctgaagctctaccacgccttctcagcaatgaagaaggtggagaccaacatggccttttccccattcagcatcgccagcctccttacccaggtcctgctcggggctggggagaacaccaaaacaaacctggagagcatcctctcttaccccaaggacttcacctgtgtccaccaggccctgaagggcttcacgaccaaaggtgtcacctcagtctctcagattttccacagcccagacctggccataagggacacctttgtgaatgcctctcggaccctgtacagcagcagccccagagtcctaagcaacaacagtgacgccaacttggagctcatcaacacctgggtggccaagaacaccaacaacaagatcagccggctgctagacagtctgccctccgatacccgccttgtcctcctcaatgctatctacctgagtgccaagtggaagacaacatttgatcccaagaaaaccagaatggaaccctttcacttcaaaaactcagttataaaagtgcccatgatgaatagcaagaagtaccctgtggcccatttcattgaccaaactttgaaagccaaggtggggcagctgcagctctcccacaatctgagtttggtgatcctggtaccccagaacctgaaacatcgtcttgaagacatggaacaggctctcagcccttctgttttcaaggccatcatggagaaactggagatgtccaagttccagcccactctcctaacactaccccgcatcaaagtgacgaccagccaggatatgctctcaatcatggagaaattggaattcttcgatttttcttatgaccttaacctgtgtgggctgacagaggaccctgatcttcaggtttctgcgatgcagcaccagacagtgctggaactgacagagactggggtggaggcggctgcagcctccgccatctctgtggcccgcaccctgctggtctttgaagtgcagcagcccttcctcttcgtgctctgggaccagcagcacaagttccctgtcttcatggggcgagtatatgaccccagggccgacaaaactcacacatgcccaccgtgcccagcacctgaactcctggggggaccgtcagtcttcctcttccccccaaaacccaaggacaccctcatgatctcccggacccctgaggtcacatgcgtggtggtggacgtgagccacgaagaccctgaggtcaagttcaactggtacgtggacggcgtggaggtgcataatgccaagacaaagccgcgggaggagcagtacaacagcacgtaccgtgtggtcagcgtcctcaccgtcctgcaccaggactggctgaatggcaaggagtacaagtgcaaggtctccaacaaagccctcccagcccccatcgagaaaaccatctccaaagccaaagggcagccccgagaaccacaggtgtacaccctgcccccatcccgggatgagctgaccaagaaccaggtcagcctgacctgcctggtcaaaggcttctatcccagcgacatcgccgtggagtgggagagcaatgggcagccggagaacaactacaagaccacgcctcccgtgctggactccgacggctccttcttcctctacagcaagctcaccgtggacaagagcaggtggcagcaggggaacgtcttctcatgctccgtgctgcatgaggctctgcacagccactacacgcagaagagcctctccctgtctccgggt

SEQ ID NO: 170 - DNA, 2178 bp, Artificial Sequence
  SERPING1.Fc(IFL)
atggcctccaggctgaccctgctgaccctcctgctgctgctgctggctggggatagagcctcctcaaatccaaatgctaccagctccagctcccaggatccagagagtttgcaagacagaggcgaagggaaggtcgcaacaacagttatctccaagatgctattcgttgaacccatcctggaggtttccagcttgccgacaaccaactcaacaaccaattcagccaccaaaataacagctaataccactgatgaacccaccacacaacccaccacagagcccaccacccaacccaccatccaacccacccaaccaactacccagctcccaacagattctcctacccagcccactactgggtccttctgcccaggacctgttactctctgctctgacttggagagtcattcaacagaggccgtgttgggggatgctttggtagatttctccctgaagctctaccacgccttctcagcaatgaagaaggtggagaccaacatggccttttccccattcagcatcgccagcctccttacccaggtcctgctcggggctggggagaacaccaaaacaaacctggagagcatcctctcttaccccaaggacttcacctgtgtccaccaggccctgaagggcttcacgaccaaaggtgtcacctcagtctctcagattttccacagcccagacctggccataagggacacctttgtgaatgcctctcggaccctgtacagcagcagccccagagtcctaagcaacaacagtgacgccaacttggagctcatcaacacctgggtggccaagaacaccaacaacaagatcagccggctgctagacagtctgccctccgatacccgccttgtcctcctcaatgctatctacctgagtgccaagtggaagacaacatttgatcccaagaaaaccagaatggaaccctttcacttcaaaaactcagttataaaagtgcccatgatgaatagcaagaagtaccctgtggcccatttcattgaccaaactttgaaagccaaggtggggcagctgcagctctcccacaatctgagtttggtgatcctggtaccccagaacctgaaacatcgtcttgaagacatggaacaggctctcagcccttctgttttcaaggccatcatggagaaactggagatgtccaagttccagcccactctcctaacactaccccgcatcaaagtgacgaccagccaggatatgctctcaatcatggagaaattggaattcttcgatttttcttatgaccttaacctgtgtgggctgacagaggaccctgatcttcaggtttctgcgatgcagcaccagacagtgctggaactgacagagactggggtggaggcggctgcagcctccgccatctctgtggcccgcaccctgctggtctttgaagtgcagcagcccttcctcttcgtgctctgggaccagcagcacaagttccctgtcttcatggggcgagtatatgaccccagggccgacaaaactcacacatgcccaccgtgcccagcacctgaactcctggggggaccgtcagtcttcctcttccccccaaaacccaaggacaccctcatgatctcccggacccctgagatcacatgcgtggtggtggacgtgagccacgaagaccctgaggtcaagttcaactggtacgtggacggcgtggaggtgcataatgccaagacaaagccgcgggaggagcagtacaacagcacgtaccgtgtggtcagcgtcctcaccttcctgcaccaggactggctgaatggcaaggagtacaagtgcaaggtctccaacaaagccctcccagcccccatcgagaaaaccatctccaaagccaaagggcagccccgagaaccacaggtgtacaccctgcccccatcccgggatgagctgaccaagaaccaggtcagcctgacctgcctggtcaaaggcttctatcccagcgacatcgccgtggagtgggagagcaatgggcagccggagaacaactacaagaccacgcctcccgtgctggactccgacggctccttcttcctctacagcaagctcaccgtggacaagagcaggtggcagcaggggaacgtcttctcatgctccgtgctgcatgaggctctgcacaaccactacacgcagaagagcctctccctgtctccgggt

SEQ ID NO: 171 - DNA, 2462 bp, Artificial Sequence
  SERPING1co21(Intron 2-3)(SINES_LINES)
atggcctctaggctgactctgctgactctgctgctcctgctgctggctggggtatgtggtcccttgtgggatgggggacgggggtggagacgggaggcgggatggtgcggggtgcgggcggtggctgaggattaacccttcaggctccggggaatgaggagagctcctcttgggatcattgagtgtgatccttgcacacgcactcgtagatgtatcaaagcaagagtttgttgtagaaaagagctgtggggaggagaggtttggctgctgtgacacagacggtggtcccaggctagggcctgtgaagacagggaagaatggtagcaaacatacgtgggtctgggtgggggtcaatagcagtgagaggtcccagtggtctgggaggtcatggactagaaataaggctaagaagtgcaggatcccaggagaaaggtaggtaggggtgtgtgtatgtgcgtgtgtgtgtgtgtgcacgcgcaagttggtatcacatactcagcgtgcctatactacttctctctccctcccttcctgcctcccttctttcctccttccctttcttcgttcccttcctaatgtgtactgttttttactgttctaaatcaaggagcacaagttcaaatgtctgtactagccaagcaagtgagtcaaacaggtagatatttacaggaaattgcaagaacatagataaatgacaacactcagcttcactgtttggaaaacaacttcctacagggcagtaattggtcagagattacagagtccctgactatccctcatcttctgcagagcacattcctgtgcacccccaccctcaccctgtattgccccttctctgaggaattagtggtggtggttctaagacagattgctcatctgccgcactgtcagaaattactctcttgtacaggacattttccacatccacaccttctcttcctgctttgagtattttagaggactgtgcctcgtagtaagaaaaaaatgaaactcagtttcttgaaccacaggacagggccagctctaaccccaatgctacttctagctcctctcaggaccctgagagcctgcaggacaggggggagggcaaggtggccaccactgtgatctctaagatgctgtttgtggagcccatcctggaggtgagcagcctgcccaccaccaacagcaccaccaactctgccactaagatcactgccaacaccactgatgagcccaccacccagcccactactgagcccaccacccagcctactatccagcccacccagcccactacccagctgcccactgacagccctacccagcccaccactggcagcttctgccctgggcctgtgaccctgtgctctgacctggagagccattctactgaggctgtgctgggggatgccctggtggacttctctctgaagctgtaccatgctttctctgccatgaagaaggtggagactaacatggcttttagccccttcagcattgctagcctgctgacccaggtgctgctgggggctggggagaacactaagaccaacctggaatctatcctgagctaccccaaggacttcacctgtgtgcaccaggccctgaagggcttcaccaccaagggggtgacctctgtgagccagatcttccacagccctgacctggccatcagggatacttttgtgaatgccagcagaaccctgtactcttctagccccagggtgctgagcaataattctgatgctaacctggagctgatcaatacctgggtggctaagaataccaacaacaagattagcaggctgctggactctctgccttctgataccaggctggtgctgctgaatgccatttacctgtctgccaagtggaagaccacttttgaccctaagaagactaggatggagcctttccacttcaagaactctgtcattaaggtgcccatgatgaacagcaagaagtatcctgtggcccactttattgaccagactctgaaggccaaggtgggccagctgcagctgagccataacctgagcctggtgatcctggtgccccagaacctgaagcataggctggaggacatggagcaggctctgagcccctctgtgttcaaggctattatggagaagctggagatgagcaagttccagcccactctgctgaccctgcccagaatcaaggtgaccacctctcaggacatgctgagcatcatggaaaagctggagttctttgacttttcttatgacctgaatctgtgtggcctgactgaggatcctgatctgcaggtgtctgccatgcagcaccagactgtgctggagctgactgagactggggtggaggctgctgctgcttctgccatctctgtggccaggaccctgctggtgtttgaggtgcagcagcccttcctgtttgtgctgtgggaccagcagcacaagtttcctgtgttcatgggcagggtgtatgaccccagagcctga

SEQ ID NO: 172 - DNA, 2158 bp, Artificial Sequence
  SERPING1co21(Intron 3-4)(SINES_LINES)
atggcctctaggctgactctgctgactctgctgctcctgctgctggctggggacagggccagctctaaccccaatgctacttctagctcctctcaggaccctgagagcctgcaggacaggggggagggcaaggtggccaccactgtgatctctaagatgctgtttgtggagcccatcctggaggtgagcagcctgcccaccaccaacagcaccaccaactctgccactaagatcactgccaacaccactgatgagcccaccacccagcccactactgagcccaccacccagcctactatccagcccacccagcccactacccagctgcccactgacagccctacccagcccaccactggcagcttctgccctgggcctgtgaccctgtgctctgacctggagagccattctactgaggctgtgctgggggatgccctggtggacttctctctgaagctgtaccatgctttctctgccatgaagaaggtggagactaacatggcttttagccccttcagcattgctagcctgctgacccaggtgctgctgggtaagaccctgcttgaattctctccaggtcatttgttggacactcccataagagtcaccaatccagacacttacaaagccatgcctctgggaagaagctgtaaaaatgggctattatatattgggggtggggtagagggatgtatcttttcattcttgaacattccatcatttcacagtgatgtaataggcacgattgcttgtaaaactctgtgactatacaagaacatataaaataaggtcgcagccactaaccatgtttcatggcaaggagaggtgataagaaagatgaaattattatcagaagaagcagaaagccagcagcctagtgtctgacttagtgggaggtcaaaaaaatgtaaatcctctgccatcttgagggattactgtcaagtcccatttggtaattaccctaggaatggcacaaacaaattactacaagcagtggggacagagctattactccccagagagaattctaaaaaggctacagaatctttcttgagagattgagagaacacttccagctcagatgatctgtgatcccctccaaagcagggaataccctccattccagcctggtccccaaccctcattcccaaggaaggcccccgactcatcctgcaagtatctttcatctctgccctttgttgcaggggctggggagaacactaagaccaacctggaatctatcctgagctaccccaaggacttcacctgtgtgcaccaggccctgaagggcttcaccaccaagggggtgacctctgtgagccagatcttccacagccctgacctggccatcagggatacttttgtgaatgccagcagaaccctgtactcttctagccccagggtgctgagcaataattctgatgctaacctggagctgatcaatacctgggtggctaagaataccaacaacaagattagcaggctgctggactctctgccttctgataccaggctggtgctgctgaatgccatttacctgtctgccaagtggaagaccacttttgaccctaagaagactaggatggagcctttccacttcaagaactctgtcattaaggtgcccatgatgaacagcaagaagtatcctgtggcccactttattgaccagactctgaaggccaaggtgggccagctgcagctgagccataacctgagcctggtgatcctggtgccccagaacctgaagcataggctggaggacatggagcaggctctgagcccctctgtgttcaaggctattatggagaagctggagatgagcaagttccagcccactctgctgaccctgcccagaatcaaggtgaccacctctcaggacatgctgagcatcatggaaaagctggagttctttgacttttcttatgacctgaatctgtgtggcctgactgaggatcctgatctgcaggtgtctgccatgcagcaccagactgtgctggagctgactgagactggggtggaggctgctgctgcttctgccatctctgtggccaggaccctgctggtgtttgaggtgcagcagcccttcctgtttgtgctgtgggaccagcagcacaagtttcctgtgttcatgggcagggtgtatgaccccagagcctga

SEQ ID NO: 173 - DNA, 507 bp, Artificial Sequence
  hAAT enhancer
cctgcagtcttcagagggccaccgcagctccagtgccacggcaggaggctgttcctgaatagcccctgtggtaagggccaggagagtccttccatcctccaaggccctgctaaaggacacagcagccaggaagtcccctgggcccctagctgaaggacagcctgctccctccgtctctaccaggaatggccttgtcctatggaaggcactgccccatcccaaactaatctaggaatcactgtctaaccactcactgtcatgaatgtgtacttaaaggatgaggttgagtcataccaaatagtgatttcgatagttcaaaatggtgaaattagcaattctacatgattcagtctaatcaatggataccgactgtttcccacacaagtctcctgttctcttaagcttactcactgacagcctttcactctccacaaatacattaaagatatggccatcaccaagccccctaggatgacaccagacctgagagtctgaagacctggatcc

SEQ ID NO: 174 - DNA, 507 bp, Artificial Sequence
  hAAT enhancer(-CpG)
cctgcagtcttcagagggccactgcagctccagtgccatggcaggaggctgttcctgaatagcccctgtggtaagggccaggagagtccttccatcctccaaggccctgctaaaggacacagcagccaggaagtcccctgggcccctagctgaaggacagcctgctccctctgtctctaccaggaatggccttgtcctatggaaggcactgccccatcccaaactaatctaggaatcactgtctaaccactcactgtcatgaatgtgtacttaaaggatgaggttgagtcataccaaatagtgattttgatagttcaaaatggtgaaattagcaattctacatgattcagtctaatcaatggatactgactgtttcccacacaagtctcctgttctcttaagcttactcactgacagcctttcactctccacaaatacattaaagatatggccatcaccaagccccctaggatgacaccagacctgagagtctgaagacctggatcc

SEQ ID NO: 175 - DNA, 247 bp, Artificial Sequence
  WPRE3
aatcaacctctggattacaaaatttgtgaaagattgactggtattcttaactatgttgctccttttacgctatgtggatacgctgctttaatgcctttgtatcatgctattgcttcccgtatggctttcattttctcctccttgtataaatcctggttagttcttgccacggcggaactcatcgccgcctgccttgcccgctgctggacaggggctcggctgttgggcactgacaattccgtggtgt

SEQ ID NO: 176 - DNA, 247 bp, Artificial Sequence
  WPRE3(-CpG)
aatcaacctctggattacaaaatttgtgaaagattgactggtattcttaactatgttgctccttttatgctatgtggatatgctgctttaatgcctttgtatcatgctattgcttcctgtatggctttcattttctcctccttgtataaatcctggttagttcttgccatggtggaactcattgctgcctgccttgcctgctgctggacaggggcttggctgttgggcactgacaattctgtggtgt

SEQ ID NO: 177 - DNA, 589 bp, Artificial Sequence
  WPRE
aatcaacctctggattacaaaatttgtgaaagattgactggtattcttaactatgttgctccttttacgctatgtggatacgctgctttaatgcctttgtatcatgctattgcttcccgtatggctttcattttctcctccttgtataaatcctggttgctgtctctttatgaggagttgtggcccgttgtcaggcaacgtggcgtggtgtgcactgtgtttgctgacgcaacccccactggttggggcattgccaccacctgtcagctcctttccgggactttcgctttccccctccctattgccacggcggaactcatcgccgcctgccttgcccgctgctggacaggggctcggctgttgggcactgacaattccgtggtgttgtcggggaagctgacgtcctttccatggctgctcgcctgtgttgccacctggattctgcgcgggacgtccttctgctacgtcccttcggccctcaatccagcggaccttccttcccgcggcctgctgccggctctgcggcctcttccgcgtcttcgccttcgccctcagacgagtcggatctccctttgggccgcctccccgc

SEQ ID NO: 178 - DNA, 589 bp, Artificial Sequence
  WPRE(-CpG)
aatcaacctctggattacaaaatttgtgaaagattgactggtattcttaactatgttgctccttttatgctatgtggatatgctgctttaatgcctttgtatcatgctattgcttcctgtatggctttcattttctcctccttgtataaatcctggttgctgtctctttatgaggagttgtggcctgttgtcaggcaatgtggtgtggtgtgcactgtgtttgctgatgcaacccccactggttggggcattgccaccacctgtcagctcctttctgggacttttgctttccccctccctattgccatggtggaactcattgctgcctgccttgcctgctgctggacaggggcttggctgttgggcactgacaattctgtggtgttgttggggaagctgatgtcctttccatggctgcttgcctgtgttgccacctggattctgtgtgggatgtccttctgctatgtccctttggccctcaatccagtggaccttccttcctgtggcctgctgctggctctgtggcctcttctgtgtctttgcctttgccctcagatgagttggatctccctttgggctgcctccctgc

SEQ ID NO: 179 - DNA, 106 bp, Artificial Sequence
  4xmir-142-3p
tccataaagtaggaaacactacaccattccataaagtaggaaacactacaaccagttccataaagtaggaaacactacatcactccataaagtaggaaacactaca

SEQ ID NO: 180 - DNA, 586 bp, Artificial Sequence
  SERPING1 5' UTR
agtctgcactggagctgcctggtgaccagaagtttggagtaggtttggtgctgggcaggggtggggagtagggtggaaagcatggagtgaagaggtctagggagggggtctcctcacccccgccttcctgcccgccttgatctcgggggtctctataggcttgcttccacctgggacttctgcctcctcctaccccagcccctcccgcctcaggcctgttgtgctcagccccccaggacctcccctcccccacgcctctggcctcattgtttggttaaagcaggaccccctccccctcccaccacctcccctccgactgaacagatggacagagacccgggcccacggggagaggaagggccagccggtgccgggaaagggaagcggtttggggaaaacaaaacagagggaggagccagggagaaggtggccccaggagggaggaggagggaattcgctaagagggactggggcctgagacggaatgggggcgggccccgggcggggtgggggcccctgggctcccagggtgggagctggctccgaggctggctggctccgcaggtccgctgacgtcgccgcccag

SEQ ID NO: 181 - protein, 478 aa, Artificial Sequence
  SERPING1 aa_sequence without SP
NPNATSSSSQDPESLQDRGEGKVATTVISKMLFVEPILEVSSLPTTNSTTNSATKITANTTDEPTTQPTTEPTTQPTIQPTQPTTQLPTDSPTQPTTGSFCPGPVTLCSDLESHSTEAVLGDALVDFSLKLYHAFSAMKKVETNMAFSPFSIASLLTQVLLGAGENTKTNLESILSYPKDFTCVHQALKGFTTKGVTSVSQIFHSPDLAIRDTFVNASRTLYSSSPRVLSNNSDANLELINTWVAKNTNNKISRLLDSLPSDTRLVLLNAIYLSAKWKTTFDPKKTRMEPFHFKNSVIKVPMMNSKKYPVAHFIDQTLKAKVGQLQLSHNLSLVILVPQNLKHRLEDMEQALSPSVFKAIMEKLEMSKFQPTLLTLPRIKVTTSQDMLSIMEKLEFFDFSYDLNLCGLTEDPDLQVSAMQHQTVLELTETGVEAAAASAISVARTLLVFEVQQPFLFVLWDQQHKFPVFMGRVYDPRA

SEQ ID NO: 182 - DNA, 371 bp, Artificial Sequence
  SERPING1 APRE
ttgaggaataacggaggtgagcaatttccaaaaagttcattcctttaaaaactgcggagcacattttgtgtacatgctgtttttattgttactcatgaagacgcgggggaagctttggttgtgtaaagctgagaactgcacccaagcttccccgttcaccccacctaccaggggatttgggctaaattcctggcctggcccacaaagaagaccaagcggtcagtcccattccgtcccatcctgatttacaggaactcacaccagcgatcaatcttccttaatttgtaactgggcagtgtcccgggccagccaatagctaagactgccccccccgcaccccaccctccctgaccctgggggactctctactc

SEQ ID NO: 183 - DNA, 33 bp, Artificial Sequence
  SAA2 5' UTR
agggacccgcagctcagctacagcacagatcag

SEQ ID NO: 184 - DNA, 137 bp, Artificial Sequence
  SAA2 3' UTR
gcttcctcttcactctgctctcaggagacctggctatgaggccctcggggcagggatacaaagttagtgaggtctatgtccagagaagctgagatatggcatataataggcatctaataaatgcttaagaggtggaa

SEQ ID NO: 185 - DNA, 16 bp, Artificial Sequence
  1xRIDD
gcacctctgcagcagg

SEQ ID NO: 186 - DNA, 48 bp, Artificial Sequence
  3xRIDD
gcacctctgcagcaggaagtctctgcagaagataacacctgcagagtg

SEQ ID NO: 187 - DNA, 33 bp, Artificial Sequence
  BlosRIDD
ctacaaagggcagctgcagtctgccccttccta

SEQ ID NO: 188 - protein, 738 aa, Artificial Sequence
  VP1
MAADGYLPDWLEDNLSEGIREWWDLKPGAPKPKANQQKQDNGRGLVLPGYKYLGPFNGLDKGEPVNAADAAALEHDKAYDQQLQAGDNPYLRYNHADAEFQERLQEDTSFGGNLGRAVFQAKKRVLEPLGLVESPVKTAPGKKRPVEPSPQRSPDSSTGIGKKGQQPAKKRLNFGQTGDSESVPDPQPIGEPPAGPSGLGSGTMAAGGGAPMADNNEGADGVGSSSGNWHCDSTWLGDRVITTSTRTWALPTYNNHLYKQISNGTSGGSTNDNTYFGYSTPWGYFDFNRFHCHFSPRDWQRLINNNWGFRPKRLNFKLFNIQVKEVTQNEGTKTIANNLTSTIQVFTDSEYQLPYVLGSAHQGCLPPFPADVFMIPQYGYLTLNNGSQAVGRSSFYCLEYFPSQMLRTGNNFEFSYNFEDVPFHSSYAHSQSLDRLMNPLIDQYLYYLSRTQSTGGTAGTQQLLFSQAGPNNMSAQAKNWLPGPCYRQQRVSTTLSQNNNSNFAWTGATKYHLNGRDSLVNPGVAMATHKDDEERFFPSSGVLMFGKQGAGKDNVDYSSVMLTSEEEIKTTNPVATEQYGVVADNLQQQNAAPIVGAVNSQGALPGMVWQNRDVYLQGPIWAKIPHTDGNFHPSPLMGGFGLKHPPPQILIKNTPVPADPPTTFNQAKLASFITQYSTGQVSVEIEWELQKENSKRWNPEIQYTSNYYKSTNVDFAVNTEGTYSEPRPIGTRYLTRNL

SEQ ID NO: 189 - protein, 601 aa, Artificial Sequence
  VP2
TAPGKKRPVEPSPQRSPDSSTGIGKKGQQPAKKRLNFGQTGDSESVPDPQPIGEPPAGPSGLGSGTMAAGGGAPMADNNEGADGVGSSSGNWHCDSTWLGDRVITTSTRTWALPTYNNHLYKQISNGTSGGSTNDNTYFGYSTPWGYFDFNRFHCHFSPRDWQRLINNNWGFRPKRLNFKLFNIQVKEVTQNEGTKTIANNLTSTIQVFTDSEYQLPYVLGSAHQGCLPPFPADVFMIPQYGYLTLNNGSQAVGRSSFYCLEYFPSQMLRTGNNFEFSYNFEDVPFHSSYAHSQSLDRLMNPLIDQYLYYLSRTQSTGGTAGTQQLLFSQAGPNNMSAQAKNWLPGPCYRQQRVSTTLSQNNNSNFAWTGATKYHLNGRDSLVNPGVAMATHKDDEERFFPSSGVLMFGKQGAGKDNVDYSSVMLTSEEEIKTTNPVATEQYGVVADNLQQQNAAPIVGAVNSQGALPGMVWQNRDVYLQGPIWAKIPHTDGNFHPSPLMGGFGLKHPPPQILIKNTPVPADPPTTFNQAKLASFITQYSTGQVSVEIEWELQKENSKRWNPEIQYTSNYYKSTNVDFAVNTEGTYSEPRPIGTRYLTRNL

SEQ ID NO: 190 - protein, 535 aa, Artificial Sequence
  VP3
MAAGGGAPMADNNEGADGVGSSSGNWHCDSTWLGDRVITTSTRTWALPTYNNHLYKQISNGTSGGSTNDNTYFGYSTPWGYFDFNRFHCHFSPRDWQRLINNNWGFRPKRLNFKLFNIQVKEVTQNEGTKTIANNLTSTIQVFTDSEYQLPYVLGSAHQGCLPPFPADVFMIPQYGYLTLNNGSQAVGRSSFYCLEYFPSQMLRTGNNFEFSYNFEDVPFHSSYAHSQSLDRLMNPLIDQYLYYLSRTQSTGGTAGTQQLLFSQAGPNNMSAQAKNWLPGPCYRQQRVSTTLSQNNNSNFAWTGATKYHLNGRDSLVNPGVAMATHKDDEERFFPSSGVLMFGKQGAGKDNVDYSSVMLTSEEEIKTTNPVATEQYGVVADNLQQQNAAPIVGAVNSQGALPGMVWQNRDVYLQGPIWAKIPHTDGNFHPSPLMGGFGLKHPPPQILIKNTPVPADPPTTFNQAKLASFITQYSTGQVSVEIEWELQKENSKRWNPEIQYTSNYYKSTNVDFAVNTEGTYSEPRPIGTRYLTRNL

SEQ ID NO: 191 - protein, 736 aa, Artificial Sequence
  VP1
MAADGYLPDWLEDNLSEGIREWWALQPGAPKPKANQQHQDNARGLVLPGYKYLGPGNGLDKGEPVNAADAAALEHDKAYDQQLKAGDNPYLKYNHADAEFQERLKEDTSFGGNLGRAVFQAKKRLLEPLGLVEEAAKTAPGKKRPVDQSPQEPDSSSGVGKSGKQPARKRLNFGQTGDSESVPDPQPLGEPPAAPTSLGSNTMASGGGAPMADNNEGADGVGNSSGNWHCDSQWLGDRVITTSTRTWALPTYNNHLYKQISSQSGASNDNHYFGYSTPWGYFDFNRFHCHFSPRDWQRLINNNWGFRPKKLSFKLFNIQVKEVTQNDGTTTIANNLTSTVQVFTDSEYQLPYVLGSAHQGCLPPFPADVFMVPQYGYLTLNNGSQAVGRSSFYCLEYFPSQMLRTGNNFQFSYTFEDVPFHSSYAHSQSLDRLMNPLIDQYLYYLNRTQGTTSGTTNQSRLLFSQAGPQSMSLQARNWLPGPCYRQQRLSKTANDNNNSNFPWTAASKYHLNGRDSLVNPGPAMASHKDDEEKFFPMHGNLIFGKEGTTASNAELDNVMITDEEEIRTTNPVATEQYGTVANNLQSSNTAPTTRTVNDQGALPGMVWQDRDVYLQGPIWAKIPHTDGHFHPSPLMGGFGLKHPPPQIMIKNTPVPANPPTTFSPAKFASFITQYSTGQVSVEIEWELQKENSKRWNPEIQYTSNYNKSVNVDFTVDTNGVYSEPRPIGTRYLTRPL

SEQ ID NO: 192 - protein, 500 aa, Artificial Sequence
  SERPING1 aa sequence
MASRLTLLTLLLLLLAGDRASSNPNATSSSSQDPESLQDRGEGKVATTVISKMLFVEPILEVSSLPTTNSTTNSATKITANTTDEPTTQPTTEPTTQPTIQPTQPTTQLPTDSPTQPTTGSFCPGPVTLCSDLESHSTEAVLGDALVDFSLKLYHAFSAMKKVETNMAFSPFSIASLLTQVLLGAGENTKTNLESILSYPKDFTCVHQALKGFTTKGVTSVSQIFHSPDLAIRDTFVNASRTLYSSSPRVLSNNSDANLELINTWVAKNTNNKISRLLDSLPSDTRLVLLNAIYLSAKWKTTFDPKKTRMEPFHFKNSVIKVPMMNSKKYPVAHFIDQTLKAKVGQLQLSHNLSLVILVPQNLKHRLEDMEQALSPSVFKAIMEKLEMSKFQPTLLTLPRIKVTTSQDMLSIMEKLEFFDFSYDLNLCGLTEDPDLQVSAMQHQTVLELTETGVEAAAASAISVARTLLVFEVQQPFLFVLWDQQHKFPVFMGRVYDPRA

SEQ ID NO: 193 - protein, 426 aa, Artificial Sequence
  delta76.SERPING1 aa sequence
MASRLTLLTLLLLLLAGDRASSNPTIQPTQPTTQLPTDSPTQPTTGSFCPGPVTLCSDLESHSTEAVLGDALVDFSLKLYHAFSAMKKVETNMAFSPFSIASLLTQVLLGAGENTKTNLESILSYPKDFTCVHQALKGFTTKGVTSVSQIFHSPDLAIRDTFVNASRTLYSSSPRVLSNNSDANLELINTWVAKNTNNKISRLLDSLPSDTRLVLLNAIYLSAKWKTTFDPKKTRMEPFHFKNSVIKVPMMNSKKYPVAHFIDQTLKAKVGQLQLSHNLSLVILVPQNLKHRLEDMEQALSPSVFKAIMEKLEMSKFQPTLLTLPRIKVTTSQDMLSIMEKLEFFDFSYDLNLCGLTEDPDLQVSAMQHQTVLELTETGVEAAAASAISVARTLLVFEVQQPFLFVLWDQQHKFPVFMGRVYDPRA

SEQ ID NO: 194 - protein, 404 aa, Artificial Sequence
  delta98.SERPING1 aa sequence
MASRLTLLTLLLLLLAGDRASSNGSFCPGPVTLCSDLESHSTEAVLGDALVDFSLKLYHAFSAMKKVETNMAFSPFSIASLLTQVLLGAGENTKTNLESILSYPKDFTCVHQALKGFTTKGVTSVSQIFHSPDLAIRDTFVNASRTLYSSSPRVLSNNSDANLELINTWVAKNTNNKISRLLDSLPSDTRLVLLNAIYLSAKWKTTFDPKKTRMEPFHFKNSVIKVPMMNSKKYPVAHFIDQTLKAKVGQLQLSHNLSLVILVPQNLKHRLEDMEQALSPSVFKAIMEKLEMSKFQPTLLTLPRIKVTTSQDMLSIMEKLEFFDFSYDLNLCGLTEDPDLQVSAMQHQTVLELTETGVEAAAASAISVARTLLVFEVQQPFLFVLWDQQHKFPVFMGRVYDPRA

SEQ ID NO: 195 - protein, 1022 aa, Artificial Sequence
  SERPING1co21.P2A.SERPING1co24 aa sequence
MASRLTLLTLLLLLLAGDRASSNPNATSSSSQDPESLQDRGEGKVATTVISKMLFVEPILEVSSLPTTNSTTNSATKITANTTDEPTTQPTTEPTTQPTIQPTQPTTQLPTDSPTQPTTGSFCPGPVTLCSDLESHSTEAVLGDALVDFSLKLYHAFSAMKKVETNMAFSPFSIASLLTQVLLGAGENTKTNLESILSYPKDFTCVHQALKGFTTKGVTSVSQIFHSPDLAIRDTFVNASRTLYSSSPRVLSNNSDANLELINTWVAKNTNNKISRLLDSLPSDTRLVLLNAIYLSAKWKTTFDPKKTRMEPFHFKNSVIKVPMMNSKKYPVAHFIDQTLKAKVGQLQLSHNLSLVILVPQNLKHRLEDMEQALSPSVFKAIMEKLEMSKFQPTLLTLPRIKVTTSQDMLSIMEKLEFFDFSYDLNLCGLTEDPDLQVSAMQHQTVLELTETGVEAAAASAISVARTLLVFEVQQPFLFVLWDQQHKFPVFMGRVYDPRAGSGATNFSLLKQAGDVEENPGPMASRLTLLTLLLLLLAGDRASSNPNATSSSSQDPESLQDRGEGKVATTVISKMLFVEPILEVSSLPTTNSTTNSATKITANTTDEPTTQPTTEPTTQPTIQPTQPTTQLPTDSPTQPTTGSFCPGPVTLCSDLESHSTEAVLGDALVDFSLKLYHAFSAMKKVETNMAFSPFSIASLLTQVLLGAGENTKTNLESILSYPKDFTCVHQALKGFTTKGVTSVSQIFHSPDLAIRDTFVNASRTLYSSSPRVLSNNSDANLELINTWVAKNTNNKISRLLDSLPSDTRLVLLNAIYLSAKWKTTFDPKKTRMEPFHFKNSVIKVPMMNSKKYPVAHFIDQTLKAKVGQLQLSHNLSLVILVPQNLKHRLEDMEQALSPSVFKAIMEKLEMSKFQPTLLTLPRIKVTTSQDMLSIMEKLEFFDFSYDLNLCGLTEDPDLQVSAMQHQTVLELTETGVEAAAASAISVARTLLVFEVQQPFLFVLWDQQHKFPVFMGRVYDPRA

SEQ ID NO: 196 - protein, 726 aa, Artificial Sequence
  SERPING1.Fc aa sequence
MASRLTLLTLLLLLLAGDRASSNPNATSSSSQDPESLQDRGEGKVATTVISKMLFVEPILEVSSLPTTNSTTNSATKITANTTDEPTTQPTTEPTTQPTIQPTQPTTQLPTDSPTQPTTGSFCPGPVTLCSDLESHSTEAVLGDALVDFSLKLYHAFSAMKKVETNMAFSPFSIASLLTQVLLGAGENTKTNLESILSYPKDFTCVHQALKGFTTKGVTSVSQIFHSPDLAIRDTFVNASRTLYSSSPRVLSNNSDANLELINTWVAKNTNNKISRLLDSLPSDTRLVLLNAIYLSAKWKTTFDPKKTRMEPFHFKNSVIKVPMMNSKKYPVAHFIDQTLKAKVGQLQLSHNLSLVILVPQNLKHRLEDMEQALSPSVFKAIMEKLEMSKFQPTLLTLPRIKVTTSQDMLSIMEKLEFFDFSYDLNLCGLTEDPDLQVSAMQHQTVLELTETGVEAAAASAISVARTLLVFEVQQPFLFVLWDQQHKFPVFMGRVYDPRADKTHTCPPCPAPELLGGPSVFLFPPKPKDTLMISRTPEVTCVVVDVSHEDPEVKFNWYVDGVEVHNAKTKPREEQYNSTYRVVSVLTVLHQDWLNGKEYKCKVSNKALPAPIEKTISKAKGQPREPQVYTLPPSRDELTKNQVSLTCLVKGFYPSDIAVEWESNGQPENNYKTTPPVLDSDGSFFLYSKLTVDKSRWQQGNVFSCSVMHEALHNHYTQKSLSLSPG

SEQ ID NO: 197 - protein, 726 aa, Artificial Sequence
  SERPING1.Fc(Ishino) aa sequence
MASRLTLLTLLLLLLAGDRASSNPNATSSSSQDPESLQDRGEGKVATTVISKMLFVEPILEVSSLPTTNSTTNSATKITANTTDEPTTQPTTEPTTQPTIQPTQPTTQLPTDSPTQPTTGSFCPGPVTLCSDLESHSTEAVLGDALVDFSLKLYHAFSAMKKVETNMAFSPFSIASLLTQVLLGAGENTKTNLESILSYPKDFTCVHQALKGFTTKGVTSVSQIFHSPDLAIRDTFVNASRTLYSSSPRVLSNNSDANLELINTWVAKNTNNKISRLLDSLPSDTRLVLLNAIYLSAKWKTTFDPKKTRMEPFHFKNSVIKVPMMNSKKYPVAHFIDQTLKAKVGQLQLSHNLSLVILVPQNLKHRLEDMEQALSPSVFKAIMEKLEMSKFQPTLLTLPRIKVTTSQDMLSIMEKLEFFDFSYDLNLCGLTEDPDLQVSAMQHQTVLELTETGVEAAAASAISVARTLLVFEVQQPFLFVLWDQQHKFPVFMGRVYDPRADKTHTCPPCPAPELLGGPSVFLFPPKPKDTLMISRTPEVTCVVVDVSHEDPEVKFNWYVDGVEVHNAKTKPREEQYNSTYRVVSVLTVLHQDWLNGKEYKCKVSNKALPAPIEKTISKAKGQPREPQVYTLPPSRDELTKNQVNLTCLVKGFYPSDIAVEWESNGQPENNYKTTPPVLDSDGSFFLNSKLTVDKSRWQQGNVFSCSVMHEALHNHYTQKSLSLSPG

SEQ ID NO: 198 - protein, 726 aa, Artificial Sequence
  SERPING1.Fc(Ying) aa sequence
MASRLTLLTLLLLLLAGDRASSNPNATSSSSQDPESLQDRGEGKVATTVISKMLFVEPILEVSSLPTTNSTTNSATKITANTTDEPTTQPTTEPTTQPTIQPTQPTTQLPTDSPTQPTTGSFCPGPVTLCSDLESHSTEAVLGDALVDFSLKLYHAFSAMKKVETNMAFSPFSIASLLTQVLLGAGENTKTNLESILSYPKDFTCVHQALKGFTTKGVTSVSQIFHSPDLAIRDTFVNASRTLYSSSPRVLSNNSDANLELINTWVAKNTNNKISRLLDSLPSDTRLVLLNAIYLSAKWKTTFDPKKTRMEPFHFKNSVIKVPMMNSKKYPVAHFIDQTLKAKVGQLQLSHNLSLVILVPQNLKHRLEDMEQALSPSVFKAIMEKLEMSKFQPTLLTLPRIKVTTSQDMLSIMEKLEFFDFSYDLNLCGLTEDPDLQVSAMQHQTVLELTETGVEAAAASAISVARTLLVFEVQQPFLFVLWDQQHKFPVFMGRVYDPRADKTHTCPPCPAPELLGGPSVFLFPPKPKDTLMISRTPEVTCVVVDVSHEDPEVKFNWYVDGVEVHNAKTKPREEQYNSTYRVVSVLTVLHQDWLNGKEYKCKVSNKALPAPIEKTISKAKGQPREPQVYTKPPSRDELTKNQVSLSCLVKGFYPSDIAVEWESNGQPENNYKTTVPVLDSDGSFRLASYLTVDKSRWQQGNVFSCSVMHEALHNHYTQKSLSLSPG

SEQ ID NO: 199 - protein, 726 aa, Artificial Sequence
  SERPING1.Fc(YTE) aa sequence
MASRLTLLTLLLLLLAGDRASSNPNATSSSSQDPESLQDRGEGKVATTVISKMLFVEPILEVSSLPTTNSTTNSATKITANTTDEPTTQPTTEPTTQPTIQPTQPTTQLPTDSPTQPTTGSFCPGPVTLCSDLESHSTEAVLGDALVDFSLKLYHAFSAMKKVETNMAFSPFSIASLLTQVLLGAGENTKTNLESILSYPKDFTCVHQALKGFTTKGVTSVSQIFHSPDLAIRDTFVNASRTLYSSSPRVLSNNSDANLELINTWVAKNTNNKISRLLDSLPSDTRLVLLNAIYLSAKWKTTFDPKKTRMEPFHFKNSVIKVPMMNSKKYPVAHFIDQTLKAKVGQLQLSHNLSLVILVPQNLKHRLEDMEQALSPSVFKAIMEKLEMSKFQPTLLTLPRIKVTTSQDMLSIMEKLEFFDFSYDLNLCGLTEDPDLQVSAMQHQTVLELTETGVEAAAASAISVARTLLVFEVQQPFLFVLWDQQHKFPVFMGRVYDPRADKTHTCPPCPAPELLGGPSVFLFPPKPKDTLYITREPEVTCVVVDVSHEDPEVKFNWYVDGVEVHNAKTKPREEQYNSTYRVVSVLTVLHQDWLNGKEYKCKVSNKALPAPIEKTISKAKGQPREPQVYTLPPSRDELTKNQVSLTCLVKGFYPSDIAVEWESNGQPENNYKTTPPVLDSDGSFFLYSKLTVDKSRWQQGNVFSCSVMHEALHNHYTQKSLSLSPG

SEQ ID NO: 200 - protein, 726 aa, Artificial Sequence
  SERPING1.Fc(LS) aa sequence
MASRLTLLTLLLLLLAGDRASSNPNATSSSSQDPESLQDRGEGKVATTVISKMLFVEPILEVSSLPTTNSTTNSATKITANTTDEPTTQPTTEPTTQPTIQPTQPTTQLPTDSPTQPTTGSFCPGPVTLCSDLESHSTEAVLGDALVDFSLKLYHAFSAMKKVETNMAFSPFSIASLLTQVLLGAGENTKTNLESILSYPKDFTCVHQALKGFTTKGVTSVSQIFHSPDLAIRDTFVNASRTLYSSSPRVLSNNSDANLELINTWVAKNTNNKISRLLDSLPSDTRLVLLNAIYLSAKWKTTFDPKKTRMEPFHFKNSVIKVPMMNSKKYPVAHFIDQTLKAKVGQLQLSHNLSLVILVPQNLKHRLEDMEQALSPSVFKAIMEKLEMSKFQPTLLTLPRIKVTTSQDMLSIMEKLEFFDFSYDLNLCGLTEDPDLQVSAMQHQTVLELTETGVEAAAASAISVARTLLVFEVQQPFLFVLWDQQHKFPVFMGRVYDPRADKTHTCPPCPAPELLGGPSVFLFPPKPKDTLMISRTPEVTCVVVDVSHEDPEVKFNWYVDGVEVHNAKTKPREEQYNSTYRVVSVLTVLHQDWLNGKEYKCKVSNKALPAPIEKTISKAKGQPREPQVYTLPPSRDELTKNQVSLTCLVKGFYPSDIAVEWESNGQPENNYKTTPPVLDSDGSFFLYSKLTVDKSRWQQGNVFSCSVLHEALHSHYTQKSLSLSPG

SEQ ID NO: 201 - protein, 726 aa, Artificial Sequence
  SERPING1.Fc(IFL) aa sequence
MASRLTLLTLLLLLLAGDRASSNPNATSSSSQDPESLQDRGEGKVATTVISKMLFVEPILEVSSLPTTNSTTNSATKITANTTDEPTTQPTTEPTTQPTIQPTQPTTQLPTDSPTQPTTGSFCPGPVTLCSDLESHSTEAVLGDALVDFSLKLYHAFSAMKKVETNMAFSPFSIASLLTQVLLGAGENTKTNLESILSYPKDFTCVHQALKGFTTKGVTSVSQIFHSPDLAIRDTFVNASRTLYSSSPRVLSNNSDANLELINTWVAKNTNNKISRLLDSLPSDTRLVLLNAIYLSAKWKTTFDPKKTRMEPFHFKNSVIKVPMMNSKKYPVAHFIDQTLKAKVGQLQLSHNLSLVILVPQNLKHRLEDMEQALSPSVFKAIMEKLEMSKFQPTLLTLPRIKVTTSQDMLSIMEKLEFFDFSYDLNLCGLTEDPDLQVSAMQHQTVLELTETGVEAAAASAISVARTLLVFEVQQPFLFVLWDQQHKFPVFMGRVYDPRADKTHTCPPCPAPELLGGPSVFLFPPKPKDTLMISRTPEITCVVVDVSHEDPEVKFNWYVDGVEVHNAKTKPREEQYNSTYRVVSVLTFLHQDWLNGKEYKCKVSNKALPAPIEKTISKAKGQPREPQVYTLPPSRDELTKNQVSLTCLVKGFYPSDIAVEWESNGQPENNYKTTPPVLDSDGSFFLYSKLTVDKSRWQQGNVFSCSVLHEALHNHYTQKSLSLSPG

SEQ ID NO: 202 - protein, 22 aa, Artificial Sequence
  P2A linker sequence
GSGATNFSLLKQAGDVEENPGP

SEQ ID NO: 203 - protein, 22 aa, Artificial Sequence
  SERPING1 WT sp aa sequence
MASRLTLLTLLLLLLAGDRASS

SEQ ID NO: 204 - protein, 18 aa, Artificial Sequence
  SP7 sp aa sequence
MAFLWLLSCWALLGTTFG

SEQ ID NO: 205 - protein, 18 aa, Artificial Sequence
  ALB sp aa sequence
MKWVTFISLLFLFSSAYS

SEQ ID NO: 206 - protein, 18 aa, Artificial Sequence
  ORM1 sp aa sequence
MALSWVLTVLSLLPLLEA

SEQ ID NO: 207 - protein, 19 aa, Artificial Sequence
  TF sp aa sequence
MRLAVGALLVCAVLGLCLA

SEQ ID NO: 208 - protein, 19 aa, Artificial Sequence
  AMBP sp aa sequence
MRSLGALLLLLSACLAVSA

SEQ ID NO: 209 - protein, 28 aa, Artificial Sequence
  LAMP1 sp aa sequence
MAAPGSARRPLLLLLLLLLLGLMHCASA

SEQ ID NO: 210 - protein, 32 aa, Artificial Sequence
  BTNA2 sp aa sequence
MEPAAALHFSLPASLLLLLLLLLLSLCALVSA

SEQ ID NO: 211 - protein, 17 aa, Artificial Sequence
  CD300 sp aa sequence
MWLPWALLLLWVPGCFA

SEQ ID NO: 212 - protein, 25 aa, Artificial Sequence
  NOTCH2 sp aa sequence
MPALRPALLWALLALWLCCAAPAHA

SEQ ID NO: 213 - protein, 21 aa, Artificial Sequence
  STRC sp aa sequence
MALSLWPLLLLLLLLLLLSFA

SEQ ID NO: 214 - protein, 18 aa, Artificial Sequence
  AHSG sp aa sequence
MKSLVLLLCLAQLWGCHS

SEQ ID NO: 215 - protein, 21 aa, Artificial Sequence
  SYN1 sp aa sequence
MKFALVAALALLLFLWSSCRA

SEQ ID NO: 216 - protein, 20 aa, Artificial Sequence
  SYN2 sp aa sequence
MKFALVAALALLLFLWGCHS

SEQ ID NO: 217 - protein, 21 aa, Artificial Sequence
  SYN3 sp aa sequence
MKWVTLLTLLLLLLFLWGCHS

SEQ ID NO: 218 - protein, 22 aa, Artificial Sequence
  SYN4 sp aa sequence
MKWVTLLTLLLLLLFLWSSCRA

SEQ ID NO: 219 - protein, 226 aa, Artificial Sequence
  Fc(WT) aa sequence
DKTHTCPPCPAPELLGGPSVFLFPPKPKDTLMISRTPEVTCVVVDVSHEDPEVKFNWYVDGVEVHNAKTKPREEQYNSTYRVVSVLTVLHQDWLNGKEYKCKVSNKALPAPIEKTISKAKGQPREPQVYTLPPSRDELTKNQVSLTCLVKGFYPSDIAVEWESNGQPENNYKTTPPVLDSDGSFFLYSKLTVDKSRWQQGNVFSCSVMHEALHNHYTQKSLSLSPG

SEQ ID NO: 220 - protein, 226 aa, Artificial Sequence
  Fc(Ishino) aa sequence
DKTHTCPPCPAPELLGGPSVFLFPPKPKDTLMISRTPEVTCVVVDVSHEDPEVKFNWYVDGVEVHNAKTKPREEQYNSTYRVVSVLTVLHQDWLNGKEYKCKVSNKALPAPIEKTISKAKGQPREPQVYTLPPSRDELTKNQVNLTCLVKGFYPSDIAVEWESNGQPENNYKTTPPVLDSDGSFFLNSKLTVDKSRWQQGNVFSCSVMHEALHNHYTQKSLSLSPG

SEQ ID NO: 221 - protein, 226 aa, Artificial Sequence
  Fc(Ying) aa sequence
DKTHTCPPCPAPELLGGPSVFLFPPKPKDTLMISRTPEVTCVVVDVSHEDPEVKFNWYVDGVEVHNAKTKPREEQYNSTYRVVSVLTVLHQDWLNGKEYKCKVSNKALPAPIEKTISKAKGQPREPQVYTKPPSRDELTKNQVSLSCLVKGFYPSDIAVEWESNGQPENNYKTTVPVLDSDGSFRLASYLTVDKSRWQQGNVFSCSVMHEALHNHYTQKSLSLSPG

SEQ ID NO: 222 - protein, 226 aa, Artificial Sequence
  Fc(YTE) aa sequence
DKTHTCPPCPAPELLGGPSVFLFPPKPKDTLYITREPEVTCVVVDVSHEDPEVKFNWYVDGVEVHNAKTKPREEQYNSTYRVVSVLTVLHQDWLNGKEYKCKVSNKALPAPIEKTISKAKGQPREPQVYTLPPSRDELTKNQVSLTCLVKGFYPSDIAVEWESNGQPENNYKTTPPVLDSDGSFFLYSKLTVDKSRWQQGNVFSCSVMHEALHNHYTQKSLSLSPG

SEQ ID NO: 223 - protein, 226 aa, Artificial Sequence
  Fc(LS) aa sequence
DKTHTCPPCPAPELLGGPSVFLFPPKPKDTLMISRTPEVTCVVVDVSHEDPEVKFNWYVDGVEVHNAKTKPREEQYNSTYRVVSVLTVLHQDWLNGKEYKCKVSNKALPAPIEKTISKAKGQPREPQVYTLPPSRDELTKNQVSLTCLVKGFYPSDIAVEWESNGQPENNYKTTPPVLDSDGSFFLYSKLTVDKSRWQQGNVFSCSVLHEALHSHYTQKSLSLSPG

SEQ ID NO: 224 - protein, 226 aa, Artificial Sequence
  Fc(IFL) aa sequence
DKTHTCPPCPAPELLGGPSVFLFPPKPKDTLMISRTPEITCVVVDVSHEDPEVKFNWYVDGVEVHNAKTKPREEQYNSTYRVVSVLTFLHQDWLNGKEYKCKVSNKALPAPIEKTISKAKGQPREPQVYTLPPSRDELTKNQVSLTCLVKGFYPSDIAVEWESNGQPENNYKTTPPVLDSDGSFFLYSKLTVDKSRWQQGNVFSCSVLHEALHNHYTQKSLSLSPG

SEQ ID NO: 225 - DNA, 321 bp, Artificial Sequence
  ApoE Enhancer V18
aggctcagaggcacacaggagtttctgggctcaccctgcccccttccaacccctcagttcccatcctccagcagctgtttgtgtgctgcctctgaagtccacactgaacaaacttcagcctactcatgtccctaaaatgggcaaacattgcaagcagcaaacagcaaacacacagccctccctgcctgctgaccttggagctggggcagaggtcagagacctctctgggcccatgccacctccaacatccacttgaccccttggaattttggtggagaggagcagaggttgtcctggtgtggtttaggtagtgtgagaggg

SEQ ID NO: 226 - protein, 738 aa, Artificial Sequence
  VP1
MAADGYLPDWLEDNLSEGIREWWDLKPGAPKPKANQQKQDNGRGLVLPGYKYLGPFNGLDKGEPVNAADAAALEHDKAYDQQLQAGDNPYLRYNHADAEFQERLQEDTSFGGNLGRAVFQAKKRVLEPLGLVESPVKTAPGKKRPVEPSPQRSPDSSTGIGKKGQQPAKKRLNFGQTGDSESVPDPQPIGEPPAAPSGVGPNTMAAGGGAPMADNNEGADGVGSSSGNWHCDSTWLGDRVITTSTRTWALPTYNNHLYKQISNGTSGGSTNDNTYFGYSTPWGYFDFNRFHCHFSPRDWQRLINNNWGFRPKRLNFKLFNIQVKEVTQNEGTKTIANNLTSTIQVFTDSEYQLPYVLGSAHQGCLPPFPADVFMIPQYGYLTLNNGSQAVGRSSFYCLEYFPSQMLRTGNNFEFSYNFEDVPFHSSYAHSQSLDRLMNPLIDQYLYYLSRTQSTGGTAGTQQLLFSQAGPNNMSAQAKNWLPGPCYRQQRVSTTLSQNNNSNFAWTGATKYHLNGRDSLVNPGVAMATHKDDEERFFPSSGVLMFGKQGAGKDNVDYSSVMLTSEEEIKTTNPVATEQYGVVADNLQQQNAAPIVGAVNSQGALPGMVWQNRDVYLQGPIWAKIPHTDGNFHPSPLMGGFGLKHPPPQILIKNTPVPADPPTTFNQAKLASFITQYSTGQVSVEIEWELQKENSKRWNPEIQYTSNYYKSTNVDFAVNTEGTYSEPRPIGTRYLTRNL

SEQ ID NO: 227 - DNA, 11301 bp, Artificial Sequence
  pSwap_ApoE_hAAT_HBB2m1_SERPING1co21(Intron 2-3)_BGH228 - SINES_LINES -CpG
cctgcaggcagctgcgcgctcgctcgctcactgaggccgcccgggcaaagcccgggcggcctcagtgagcgagcgagcgcgcagagagggagtggccaactccatcactaggggttcctgcggcctagtactaggctcagaggcacacaggagtttctgggctcaccctgcccccttccaacccctcagttcccatcctccagcagctgtttgtgtgctgcctctgaagtccacactgaacaaacttcagcctactcatgtccctaaaatgggcaaacattgcaagcagcaaacagcaaacacacagccctccctgcctgctgaccttggagctggggcagaggtcagagacctctctgggcccatgccacctccaacatccactcgaccccttggaatttcggtggagaggagcagaggttgtcctggcgtggtttaggtagtgtgagaggggtacccggggatcttgctaccagtggaacagccactaaggattctgcagtgagagcagagggccagctaagtggtactctcccagagactgtctgactcacgccaccccctccaccttggacacaggacgctgtggtttctgagccaggtacaatgactcctttcggtaagtgcagtggaagctgtacactgcccaggcaaagcgtccgggcagcgtaggcgggcgactcagatcccagccagtggacttagcccctgtttgctcctccgataactggggtgaccttggttaatattcaccagcagcctcccccgttgcccctctggatccactgcttaaatacggacgaggacagggccctgtctcctcagcttcaggcaccaccactgacctgggacagtgaatagatcttgagaacttcagggtgagtctatgggacccttgatgttttctttccccttcttttctatggttaagttcatgtcataggaaggggagaagtaacagggtacacatattgaccaaatcagggtaattttgcatttgtaattttaaaaaatgctttcttcttttaatatacttttttgtttatcttatttctaatactttccctaatctctttctttcagggcaataatgatacaatgtatcatgcctctttgcaccattctaaagaataacagtgataatttctgggttaaggcaatagcaatatttctgcatataaatatttctgcatataaattgtaactgatgtaagaggtttcatattgctaatagcagctacaatccagctaccattctgcttttattttctggttgggataaggctggattattctgagtccaagctaggcccttttgctaatcttgttcatacctcttatcttcctcccacagctcctgggcaacctgctggtctctctgctggcccatcactttggcaaagcactagtgccaccatggcctctaggctgactctgctgactctgctgctcctgctgctggctggggtatgtggtcccttgtgggatgggggactggggtggagaggggaggcaggatggtggggggtgcctggggtggctgaggattaacccttcaggctggggggaatgaggagagctcctcttgggatcattgagtgtgatccttgcacaggcactggtagatgtatcaaagcaagagtttgttgtagaaaagagctgtggggaggagaggtttggctgctgtgacacagagggtggtcccaggctagggcctgtgaagacagggaagaatggtagcaaacataggtgggtctgggtgggggtcaatagcagtgagaggtcccagtggtctgggaggtcatggactagaaataaggctaagaagtgcaggatcccaggagaaaggtaggtaggggtgtgtgtatgtgggtgtgtgtgtgtgtgcacccccaagttggtatcacatactcagcctgcctatactacttctctctccctcccttcctgcctcccttctttcctccttccctttcttccttcccttcctaatgtgtactgttttttactgttctaaatcaaggagcacaagttcaaatgtctgtactagccaagcaagtgagtcaaacaggtagatatttacaggaaattgcaagaacatagataaatgacaacactcagcttcactgtttggaaaacaacttcctacagggcagtaattggtcagagattacagagtccctgactatccctcatcttctgcagagcacattcctgtgcacccccaccctcaccctgtattgccccttctctgaggaattagtggtggtggttctaagacagattgctcatctgccccactgtcagaaattactctcttgtacaggacattttccacatccacaccttctcttcctgctttgagtattttagaggactgtgcctgctagtaagaaaaaaatgaaactcagtttcttgaaccacaggacagggccagctctaaccccaatgctacttctagctcctctcaggaccctgagagcctgcaggacaggggggagggcaaggtggccaccactgtgatctctaagatgctgtttgtggagcccatcctggaggtgagcagcctgcccaccaccaacagcaccaccaactctgccactaagatcactgccaacaccactgatgagcccaccacccagcccactactgagcccaccacccagcctactatccagcccacccagcccactacccagctgcccactgacagccctacccagcccaccactggcagcttctgccctgggcctgtgaccctgtgctctgacctggagagccattctactgaggctgtgctgggggatgccctggtggacttctctctgaagctgtaccatgctttctctgccatgaagaaggtggagactaacatggcttttagccccttcagcattgctagcctgctgacccaggtgctgctgggggctggggagaacactaagaccaacctggaatctatcctgagctaccccaaggacttcacctgtgtgcaccaggccctgaagggcttcaccaccaagggggtgacctctgtgagccagatcttccacagccctgacctggccatcagggatacttttgtgaatgccagcagaaccctgtactcttctagccccagggtgctgagcaataattctgatgctaacctggagctgatcaatacctgggtggctaagaataccaacaacaagattagcaggctgctggactctctgccttctgataccaggctggtgctgctgaatgccatttacctgtctgccaagtggaagaccacttttgaccctaagaagactaggatggagcctttccacttcaagaactctgtcattaaggtgcccatgatgaacagcaagaagtatcctgtggcccactttattgaccagactctgaaggccaaggtgggccagctgcagctgagccataacctgagcctggtgatcctggtgccccagaacctgaagcataggctggaggacatggagcaggctctgagcccctctgtgttcaaggctattatggagaagctggagatgagcaagttccagcccactctgctgaccctgcccagaatcaaggtgaccacctctcaggacatgctgagcatcatggaaaagctggagttctttgacttttcttatgacctgaatctgtgtggcctgactgaggatcctgatctgcaggtgtctgccatgcagcaccagactgtgctggagctgactgagactggggtggaggctgctgctgcttctgccatctctgtggccaggaccctgctggtgtttgaggtgcagcagcccttcctgtttgtgctgtgggaccagcagcacaagtttcctgtgttcatgggcagggtgtatgaccccagagcctgacatctagagctgaattcctgcagccagggggatcagcctctactgtgccttctagttgccagccatctgttgtttgcccctcccccttgccttccttgaccctggaaggtgccactcccactgtcctttcctaataaaatgaggaaattgcatcacattgtctgagtaggtgtcattctattctggggggtggggtggggcaggacagcaagggggaggattgggaagacaatagcaggcatgctggggatgcagtgggctctatggcttctgaggcagaaagaaccagctggggctcgagatccactagggccgcaggaacccctagtgatggagttggccactccctctctgcgcgctcgctcgctcactgaggccgggcgaccaaaggtcgcccgacgcccgggctttgcccgggcggcctcagtgagcgagcgagcgcgcagctgcctgcaggggcccatgggcagatgcaccacctgtctcagtgcaaagccctgcctaagtaggctggtcataagaccatgtgtctggctgtaactccaattgattgtcagcatcaataaaacttggccaacactgttatatactggtattgatagttacaactgaacatatttgtttaagcaattggaattaagaattcacatgcaatgatatcagggtccttctcctctggttagtgtattggggggaaattggacatctctcagctcagtaggctagttaggccaggatggatgacatccacagcccctgggcagagagattatgatgtagctagtctgactcctgacaaagacttgcttcctggagcttctactactttctggtggatggctaagaaatatggttgtgttcttttaagtctgaagagcattatttttgccaacccctgaccaaacatccttgccaaggaaaaggcctaaaatatatttgcatttaaagatattacaaactacttggttttggaatgtttggcctttcaggatcatagctatcaaaatattagctatttggggtatgagatgtctgcttggtcaaggacaagttcttaaagacatcatgttggggaataatggggaaaatgggaaggcttatgctctgagtaagacatctgagttatcatctgtcaaacatttttgttagtcatagtctaatgggagcctgttttccctctttaatatacattcacatctgaatttatgctcttcattgacaatgccagcccagaacaacagctcttaccctttggttttcttcctaacctttaactccaatgtaaccattacctgccatttcagtaaaaccattattctccctacttacccacccaagttgtacaataaagagtgtttgctctcactcatatacaaagcaaattcatttgtttgtgatgtacagcttgctatgcccacagatgtggtttgcctagtcctttgctctaggtcatttgactgggaacagatgggatgctcactttggtttttaatggttaatctagtcattgaaatgcatttcatcaaataatcttagaggataattgtttaaatgtctgtccagactagctttgtagagccaggtgccattacacatgtcaccttcttatttctcttaattgaatttttatcatctgagataggaataatagagggctttttcaagtgaagatattactatagtctaaagaccttagtgtaacatcctggcccctaaggaaaaacaagttctggttcatacatataataactttgcatgttatctgccactgagatgtgtcctaatccaacagaaaggattgaatctctgtagctaggtgtacagggcaagagctgtacagggaacctttaaagatagcttcaggccaaagctgaggaaagtggatggagactggggaaaatgctaagacattttaaagattttctttaggtcaaaaatagaataagaaatagaccatttccctggacattttctgtaggttaatactgttgaactattggtaaatgcttatgctacaacttaatatgtctgctttgtgagtttagcattgtctccttgtcattccagaaatgaaatggcaaatacatttaaatcagaactaaaaaggggaacagggtataaaggctcaatttagtcacatcatttccctttctcacccaccccctttaaaccagatgtttgccaatgcattaacaatgcagatgtttcctgaaagaaagtttagtaactcaagcagacaccttattttcttttcaagcagaaaagactatgagatggtggttgtggttgttctgggagggagaagatataaatgatacacattatttcaaatcatttcatgacctcactgcacacttatagttattgtacctgttgtctttttgctgtcaagcctagctaagatcatttggaatgttcaagatcactcatacatgcatgtgcacacatacacatgcacatatgttcactccctatttcatccacatgaactaagattactgatgtgtacagattcaaagcacttttattcttttccaaaggcaagaagctgagctactttccagaatagttgtgaaagaccctgtcatacttctgcattgtttcctccacaccacctccatccagttccttatgaatggttactggttttcaaaaatatgagataaattgagtgtataaaagtcatttttagacaaaatgaaacaggaaatgaaagaaaccagaatctctcctcatttgtggatgggccagctccaccatgtcatggttaatctgcagggaggaaatactagatttgattgcagatcagactgcagcaaacctgctgtgactaaggcatcaagagaaagcaagcaacagctggggcttcagtggtgaaaacattatatatctagctttgaaatatgaaatactgtttagcagtgtcacctagaaaagagtgtttcaaaatgctgatgcttcataagaacctttctcttcagagttgtttcttttatctttcaaattagccagggtgggaaataaagtgatcacttggtgaagaaatctcacaaagaagaacatagagagttcactttcatctggagtaatgaacagattgaacaaactagaaatggttagtctgttaaagaaaaggtgtaggtgagctgtttgcaagagccacaagggaaaggggaagacaacttctttgtggacttaagggtgaaagttgcaagcaggcaagaccattctgacctccattaagaaagccctttccaaccaacaaccactgggttggttactcaggttgggcagcattgggagcaaatgttgattgaacaaatgtttgtcagaattgttgacttaaagagctgttctgtcactggggacagcagcagctagatagccccattcagggagagggcatttgttcacctggccagagatcagagcaggctaagggactgctgggatcctgtccagctttgagaccctacagagccatgttcacctagcaggtatcccttctgaggtcactctcatttcttaccttattccagggctttcacctcagcttgccaggctggagccaagggccaaggcagcctcaccttgttggctatggtagcttcccaggagccccctatggttcaggaacagctctgcctgccccatcctgtttgctacctcctaaagccaaaggcactggtgggccaggccagcttctaaagtcacacaaggttagaaggttcctgacaggaagggcttgaggccaatggaaggaggtacttcagtttccctccagatgcccagtgatgggctcagagctccttgagaacttgggaaaggaagcagggtctctgaagaaatacttcaggagtagaaagaggaagctagagggttaaatgcactacacaggaacagaaatgagtttttcttagagttagtatatgtcttagaggtgtagtaaactaaaacaagtcttgaattgcatacagccacttagggaagaaatgaaaacctttgaatattagtgaaaaaagggaaactgcaacccctgtattactagatagctttcatcaacagctcaaaacagacagatttttataggtttactgtgtgcactttaatacaagggcagtggttcagaacttagtcaggtcctgaaaaggatttaccaaatgttgagtgtgccctctagtgttcacacttcccagctttcttcctataaaggtggatcaaggcacttgcttacaactggaactgaaatcctccaagtggaactagacattgagatggagaaaatattcattgtccactgtaattatgcaaggaatatccagttgagataatggacttgcctcttatctaataatacccaggctcaatgggtcactgctttgtccactttgcccaaaattcaagcacagctaagttgatattttaggacaaaggcagcttactatccagccagaggggagtagaatatggttaagagagagtggaaagaatgaatgagccctgctattcctcactgcctggatggctataagcacagcccttatggaggccttaggtcttgcttcataatattccagtttgaaaagggtttgaaaagacctcctagaaaaatcagtagtttttctcttttgagtaacatgtagcaaaaaaaatttcatcatgtaggtacagggaacaccctaataactattaatctcaaggagtcaagccagtgtgtttcctaatgtatctgctgtatccccatgaagcaaattttgccatcagagaaactgactcatggggaaaaaatccaaggacctcaaatcaccaaaagaagccattcctcagatttgcctaagcttaagcttccctgtctctcattgtgtgttgctttcaatgcagttacataaatggcttttttgtttatgcaccaaaaacactaattcatctgcaaagctataggtcaaagcaaccatagtatgcaccctgctagctggcgcattaagcgcggcgggtgtggtggttacgcgcagcgtgaccgctacacttgccagcgccttagcgcccgctcctttcgctttcttcccttcctttctcgccacgttcgccggctttccccgtcaagctctaaatcgggggctccctttagggttccgatttagtgctttacggcacctcgaccccaaaaaacttgatttgggtgatggttcacgtagtgggccatcgccctgatagacggtttttcgccctttgacgttggagtccacgttctttaatagtggactcttgttccaaactggaacaacactcaactctatctcgggctattcttttgatttagacctgcaggcatgcaagcttggcactggccgtcgttttacaacgtcgtgactgggaaaaccctggcgttacccaacttaatcgccttgcagcacatccccctttcgccagctggcgtaatagcgaagaggcccgcaccgatcgcccttcccaacagttgcgcagcctgaatggcgaatgcgatttattcaacaaagccgccgtcccgtcaagtcagcgtaatgctctgccagtgttacaaccaattaaccaattctgattagaaaaactcatcgagcatcaaatgaaactgcaatttattcatatcaggattatcaataccatatttttgaaaaagccgtttctgtaatgaaggagaaaactcaccgaggcagttccataggatggcaagatcctggtatcggtctgcgattccgactcgtccaacatcaatacaacctattaatttcccctcgtcaaaaataaggttatcaagtgagaaatcaccatgagtgacgactgaatccggtgagaatggcaaaagcttatgcatttctttccagacttgttcaacaggccagccattacgctcgtcatcaaaatcactcgcatcaaccaaaccgttattcattcgtgattgcgcctgagcgagacgaaatacgcgatcgctgttaaaaggacaattacaaacaggaatcgaatgcaaccggcgcaggaacactgccagcgcatcaacaatattttcacctgaatcaggatattcttctaatacctggaatgctgttttcccggggatcgcagtggtgagtaaccatgcatcatcaggagtacggataaaatgcttgatggtcggaagaggcataaattccgtcagccagtttagtctgaccatctcatctgtaacatcattggcaacgctacctttgccatgtttcagaaacaactctggcgcatcgggcttcccatacaatcgatagattgtcgcacctgattgcccgacattatcgcgagcccatttatacccatataaatcagcatccatgttggaatttaatcgcggcttcgagcaagacgtttcccgttgaatatggctcataacaccccttgtattactgtttatgtaagcagacagttttattgttcatgatgatatatttttatcttgtgcaatgtaacatcagagattttgagacacaacgtggctttgttgaataaatcgaacttttgctgagttgaaggatcagatcacgcatcttcccgacaacgcagaccgttccgtggcaaagcaaaagttcaaaatcaccaactggtccacctacaacaaagctctcatcaaccgtggctccctcactttctggctggatgatggggcgattcaggcctggtatgagtcagcaacaccttcttcacgaggcagacctctcgacggagttccactgagcgtcagaccccgtagaaaagatcaaaggatcttcttgagatcctttttttctgcgcgtaatctgctgcttgcaaacaaaaaaaccaccgctaccagcggtggtttgtttgccggatcaagagctaccaactctttttccgaaggtaactggcttcagcagagcgcagataccaaatactgttcttctagtgtagccgtagttaggccaccacttcaagaactctgtagcaccgcctacatacctcgctctgctaatcctgttaccagtggctgctgccagtggcgataagtcgtgtcttaccgggttggactcaagacgatagttaccggataaggcgcagcggtcgggctgaacggggggttcgtgcacacagcccagcttggagcgaacgacctacaccgaactgagatacctacagcgtgagctatgagaaagcgccacgcttcccgaagggagaaaggcggacaggtatccggtaagcggcagggtcggaacaggagagcgcacgagggagcttccagggggaaacgcctggtatctttatagtcctgtcgggtttcgccacctctgacttgagcgtcgatttttgtgatgctcgtcaggggggcggagcctatggaaaaacgccagcaacgcggcctttttacggttcctggccttttgctggccttttgctcacatgt

SEQ ID NO: 228 - DNA, 10997 bp, Artificial Sequence
  pSwap_ApoE_hAAT_HBB2m1_SERPING1co21(Intron 3-4)_BGH228 - SINES_LINES-CpG
cctgcaggcagctgcgcgctcgctcgctcactgaggccgcccgggcaaagcccgggcggcctcagtgagcgagcgagcgcgcagagagggagtggccaactccatcactaggggttcctgcggcctagtactaggctcagaggcacacaggagtttctgggctcaccctgcccccttccaacccctcagttcccatcctccagcagctgtttgtgtgctgcctctgaagtccacactgaacaaacttcagcctactcatgtccctaaaatgggcaaacattgcaagcagcaaacagcaaacacacagccctccctgcctgctgaccttggagctggggcagaggtcagagacctctctgggcccatgccacctccaacatccactcgaccccttggaatttcggtggagaggagcagaggttgtcctggcgtggtttaggtagtgtgagaggggtacccggggatcttgctaccagtggaacagccactaaggattctgcagtgagagcagagggccagctaagtggtactctcccagagactgtctgactcacgccaccccctccaccttggacacaggacgctgtggtttctgagccaggtacaatgactcctttcggtaagtgcagtggaagctgtacactgcccaggcaaagcgtccgggcagcgtaggcgggcgactcagatcccagccagtggacttagcccctgtttgctcctccgataactggggtgaccttggttaatattcaccagcagcctcccccgttgcccctctggatccactgcttaaatacggacgaggacagggccctgtctcctcagcttcaggcaccaccactgacctgggacagtgaatagatcttgagaacttcagggtgagtctatgggacccttgatgttttctttccccttcttttctatggttaagttcatgtcataggaaggggagaagtaacagggtacacatattgaccaaatcagggtaattttgcatttgtaattttaaaaaatgctttcttcttttaatatacttttttgtttatcttatttctaatactttccctaatctctttctttcagggcaataatgatacaatgtatcatgcctctttgcaccattctaaagaataacagtgataatttctgggttaaggcaatagcaatatttctgcatataaatatttctgcatataaattgtaactgatgtaagaggtttcatattgctaatagcagctacaatccagctaccattctgcttttattttctggttgggataaggctggattattctgagtccaagctaggcccttttgctaatcttgttcatacctcttatcttcctcccacagctcctgggcaacctgctggtctctctgctggcccatcactttggcaaagcactagtgccaccatggcctctaggctgactctgctgactctgctgctcctgctgctggctggggacagggccagctctaaccccaatgctacttctagctcctctcaggaccctgagagcctgcaggacaggggggagggcaaggtggccaccactgtgatctctaagatgctgtttgtggagcccatcctggaggtgagcagcctgcccaccaccaacagcaccaccaactctgccactaagatcactgccaacaccactgatgagcccaccacccagcccactactgagcccaccacccagcctactatccagcccacccagcccactacccagctgcccactgacagccctacccagcccaccactggcagcttctgccctgggcctgtgaccctgtgctctgacctggagagccattctactgaggctgtgctgggggatgccctggtggacttctctctgaagctgtaccatgctttctctgccatgaagaaggtggagactaacatggcttttagccccttcagcattgctagcctgctgacccaggtgctgctgggtaagaccctgcttgaattctctccaggtcatttgttggacactcccataagagtcaccaatccagacacttacaaagccatgcctctgggaagaagctgtaaaaatgggctattatatattgggggtggggtagagggatgtatcttttcattcttgaacattccatcatttcacagtgatgtaataggcaccattgcttgtaaaactctgtgactatacaagaacatataaaataaggtcccagccactaaccatgtttcatggcaaggagaggtgataagaaagatgaaattattatcagaagaagcagaaagccagcagcctagtgtctgacttagtgggaggtcaaaaaaatgtaaatcctctgccatcttgagggattactgtcaagtcccatttggtaattaccctaggaatggcacaaacaaattactacaagcagtggggacagagctattactccccagagagaattctaaaaaggctacagaatctttcttgagagattgagagaacacttccagctcagatgatctgtgatcccctccaaagcagggaataccctccattccagcctggtccccaaccctcattcccaaggaaggccccccactcatcctgcaagtatctttcatctctgccctttgttgcaggggctggggagaacactaagaccaacctggaatctatcctgagctaccccaaggacttcacctgtgtgcaccaggccctgaagggcttcaccaccaagggggtgacctctgtgagccagatcttccacagccctgacctggccatcagggatacttttgtgaatgccagcagaaccctgtactcttctagccccagggtgctgagcaataattctgatgctaacctggagctgatcaatacctgggtggctaagaataccaacaacaagattagcaggctgctggactctctgccttctgataccaggctggtgctgctgaatgccatttacctgtctgccaagtggaagaccacttttgaccctaagaagactaggatggagcctttccacttcaagaactctgtcattaaggtgcccatgatgaacagcaagaagtatcctgtggcccactttattgaccagactctgaaggccaaggtgggccagctgcagctgagccataacctgagcctggtgatcctggtgccccagaacctgaagcataggctggaggacatggagcaggctctgagcccctctgtgttcaaggctattatggagaagctggagatgagcaagttccagcccactctgctgaccctgcccagaatcaaggtgaccacctctcaggacatgctgagcatcatggaaaagctggagttctttgacttttcttatgacctgaatctgtgtggcctgactgaggatcctgatctgcaggtgtctgccatgcagcaccagactgtgctggagctgactgagactggggtggaggctgctgctgcttctgccatctctgtggccaggaccctgctggtgtttgaggtgcagcagcccttcctgtttgtgctgtgggaccagcagcacaagtttcctgtgttcatgggcagggtgtatgaccccagagcctgacatctagagctgaattcctgcagccagggggatcagcctctactgtgccttctagttgccagccatctgttgtttgcccctcccccttgccttccttgaccctggaaggtgccactcccactgtcctttcctaataaaatgaggaaattgcatcacattgtctgagtaggtgtcattctattctggggggtggggtggggcaggacagcaagggggaggattgggaagacaatagcaggcatgctggggatgcagtgggctctatggcttctgaggcagaaagaaccagctggggctcgagatccactagggccgcaggaacccctagtgatggagttggccactccctctctgcgcgctcgctcgctcactgaggccgggcgaccaaaggtcgcccgacgcccgggctttgcccgggcggcctcagtgagcgagcgagcgcgcagctgcctgcaggggcccatgggcagatgcaccacctgtctcagtgcaaagccctgcctaagtaggctggtcataagaccatgtgtctggctgtaactccaattgattgtcagcatcaataaaacttggccaacactgttatatactggtattgatagttacaactgaacatatttgtttaagcaattggaattaagaattcacatgcaatgatatcagggtccttctcctctggttagtgtattggggggaaattggacatctctcagctcagtaggctagttaggccaggatggatgacatccacagcccctgggcagagagattatgatgtagctagtctgactcctgacaaagacttgcttcctggagcttctactactttctggtggatggctaagaaatatggttgtgttcttttaagtctgaagagcattatttttgccaacccctgaccaaacatccttgccaaggaaaaggcctaaaatatatttgcatttaaagatattacaaactacttggttttggaatgtttggcctttcaggatcatagctatcaaaatattagctatttggggtatgagatgtctgcttggtcaaggacaagttcttaaagacatcatgttggggaataatggggaaaatgggaaggcttatgctctgagtaagacatctgagttatcatctgtcaaacatttttgttagtcatagtctaatgggagcctgttttccctctttaatatacattcacatctgaatttatgctcttcattgacaatgccagcccagaacaacagctcttaccctttggttttcttcctaacctttaactccaatgtaaccattacctgccatttcagtaaaaccattattctccctacttacccacccaagttgtacaataaagagtgtttgctctcactcatatacaaagcaaattcatttgtttgtgatgtacagcttgctatgcccacagatgtggtttgcctagtcctttgctctaggtcatttgactgggaacagatgggatgctcactttggtttttaatggttaatctagtcattgaaatgcatttcatcaaataatcttagaggataattgtttaaatgtctgtccagactagctttgtagagccaggtgccattacacatgtcaccttcttatttctcttaattgaatttttatcatctgagataggaataatagagggctttttcaagtgaagatattactatagtctaaagaccttagtgtaacatcctggcccctaaggaaaaacaagttctggttcatacatataataactttgcatgttatctgccactgagatgtgtcctaatccaacagaaaggattgaatctctgtagctaggtgtacagggcaagagctgtacagggaacctttaaagatagcttcaggccaaagctgaggaaagtggatggagactggggaaaatgctaagacattttaaagattttctttaggtcaaaaatagaataagaaatagaccatttccctggacattttctgtaggttaatactgttgaactattggtaaatgcttatgctacaacttaatatgtctgctttgtgagtttagcattgtctccttgtcattccagaaatgaaatggcaaatacatttaaatcagaactaaaaaggggaacagggtataaaggctcaatttagtcacatcatttccctttctcacccaccccctttaaaccagatgtttgccaatgcattaacaatgcagatgtttcctgaaagaaagtttagtaactcaagcagacaccttattttcttttcaagcagaaaagactatgagatggtggttgtggttgttctgggagggagaagatataaatgatacacattatttcaaatcatttcatgacctcactgcacacttatagttattgtacctgttgtctttttgctgtcaagcctagctaagatcatttggaatgttcaagatcactcatacatgcatgtgcacacatacacatgcacatatgttcactccctatttcatccacatgaactaagattactgatgtgtacagattcaaagcacttttattcttttccaaaggcaagaagctgagctactttccagaatagttgtgaaagaccctgtcatacttctgcattgtttcctccacaccacctccatccagttccttatgaatggttactggttttcaaaaatatgagataaattgagtgtataaaagtcatttttagacaaaatgaaacaggaaatgaaagaaaccagaatctctcctcatttgtggatgggccagctccaccatgtcatggttaatctgcagggaggaaatactagatttgattgcagatcagactgcagcaaacctgctgtgactaaggcatcaagagaaagcaagcaacagctggggcttcagtggtgaaaacattatatatctagctttgaaatatgaaatactgtttagcagtgtcacctagaaaagagtgtttcaaaatgctgatgcttcataagaacctttctcttcagagttgtttcttttatctttcaaattagccagggtgggaaataaagtgatcacttggtgaagaaatctcacaaagaagaacatagagagttcactttcatctggagtaatgaacagattgaacaaactagaaatggttagtctgttaaagaaaaggtgtaggtgagctgtttgcaagagccacaagggaaaggggaagacaacttctttgtggacttaagggtgaaagttgcaagcaggcaagaccattctgacctccattaagaaagccctttccaaccaacaaccactgggttggttactcaggttgggcagcattgggagcaaatgttgattgaacaaatgtttgtcagaattgttgacttaaagagctgttctgtcactggggacagcagcagctagatagccccattcagggagagggcatttgttcacctggccagagatcagagcaggctaagggactgctgggatcctgtccagctttgagaccctacagagccatgttcacctagcaggtatcccttctgaggtcactctcatttcttaccttattccagggctttcacctcagcttgccaggctggagccaagggccaaggcagcctcaccttgttggctatggtagcttcccaggagccccctatggttcaggaacagctctgcctgccccatcctgtttgctacctcctaaagccaaaggcactggtgggccaggccagcttctaaagtcacacaaggttagaaggttcctgacaggaagggcttgaggccaatggaaggaggtacttcagtttccctccagatgcccagtgatgggctcagagctccttgagaacttgggaaaggaagcagggtctctgaagaaatacttcaggagtagaaagaggaagctagagggttaaatgcactacacaggaacagaaatgagtttttcttagagttagtatatgtcttagaggtgtagtaaactaaaacaagtcttgaattgcatacagccacttagggaagaaatgaaaacctttgaatattagtgaaaaaagggaaactgcaacccctgtattactagatagctttcatcaacagctcaaaacagacagatttttataggtttactgtgtgcactttaatacaagggcagtggttcagaacttagtcaggtcctgaaaaggatttaccaaatgttgagtgtgccctctagtgttcacacttcccagctttcttcctataaaggtggatcaaggcacttgcttacaactggaactgaaatcctccaagtggaactagacattgagatggagaaaatattcattgtccactgtaattatgcaaggaatatccagttgagataatggacttgcctcttatctaataatacccaggctcaatgggtcactgctttgtccactttgcccaaaattcaagcacagctaagttgatattttaggacaaaggcagcttactatccagccagaggggagtagaatatggttaagagagagtggaaagaatgaatgagccctgctattcctcactgcctggatggctataagcacagcccttatggaggccttaggtcttgcttcataatattccagtttgaaaagggtttgaaaagacctcctagaaaaatcagtagtttttctcttttgagtaacatgtagcaaaaaaaatttcatcatgtaggtacagggaacaccctaataactattaatctcaaggagtcaagccagtgtgtttcctaatgtatctgctgtatccccatgaagcaaattttgccatcagagaaactgactcatggggaaaaaatccaaggacctcaaatcaccaaaagaagccattcctcagatttgcctaagcttaagcttccctgtctctcattgtgtgttgctttcaatgcagttacataaatggcttttttgtttatgcaccaaaaacactaattcatctgcaaagctataggtcaaagcaaccatagtatgcaccctgctagctggcgcattaagcgcggcgggtgtggtggttacgcgcagcgtgaccgctacacttgccagcgccttagcgcccgctcctttcgctttcttcccttcctttctcgccacgttcgccggctttccccgtcaagctctaaatcgggggctccctttagggttccgatttagtgctttacggcacctcgaccccaaaaaacttgatttgggtgatggttcacgtagtgggccatcgccctgatagacggtttttcgccctttgacgttggagtccacgttctttaatagtggactcttgttccaaactggaacaacactcaactctatctcgggctattcttttgatttagacctgcaggcatgcaagcttggcactggccgtcgttttacaacgtcgtgactgggaaaaccctggcgttacccaacttaatcgccttgcagcacatccccctttcgccagctggcgtaatagcgaagaggcccgcaccgatcgcccttcccaacagttgcgcagcctgaatggcgaatgcgatttattcaacaaagccgccgtcccgtcaagtcagcgtaatgctctgccagtgttacaaccaattaaccaattctgattagaaaaactcatcgagcatcaaatgaaactgcaatttattcatatcaggattatcaataccatatttttgaaaaagccgtttctgtaatgaaggagaaaactcaccgaggcagttccataggatggcaagatcctggtatcggtctgcgattccgactcgtccaacatcaatacaacctattaatttcccctcgtcaaaaataaggttatcaagtgagaaatcaccatgagtgacgactgaatccggtgagaatggcaaaagcttatgcatttctttccagacttgttcaacaggccagccattacgctcgtcatcaaaatcactcgcatcaaccaaaccgttattcattcgtgattgcgcctgagcgagacgaaatacgcgatcgctgttaaaaggacaattacaaacaggaatcgaatgcaaccggcgcaggaacactgccagcgcatcaacaatattttcacctgaatcaggatattcttctaatacctggaatgctgttttcccggggatcgcagtggtgagtaaccatgcatcatcaggagtacggataaaatgcttgatggtcggaagaggcataaattccgtcagccagtttagtctgaccatctcatctgtaacatcattggcaacgctacctttgccatgtttcagaaacaactctggcgcatcgggcttcccatacaatcgatagattgtcgcacctgattgcccgacattatcgcgagcccatttatacccatataaatcagcatccatgttggaatttaatcgcggcttcgagcaagacgtttcccgttgaatatggctcataacaccccttgtattactgtttatgtaagcagacagttttattgttcatgatgatatatttttatcttgtgcaatgtaacatcagagattttgagacacaacgtggctttgttgaataaatcgaacttttgctgagttgaaggatcagatcacgcatcttcccgacaacgcagaccgttccgtggcaaagcaaaagttcaaaatcaccaactggtccacctacaacaaagctctcatcaaccgtggctccctcactttctggctggatgatggggcgattcaggcctggtatgagtcagcaacaccttcttcacgaggcagacctctcgacggagttccactgagcgtcagaccccgtagaaaagatcaaaggatcttcttgagatcctttttttctgcgcgtaatctgctgcttgcaaacaaaaaaaccaccgctaccagcggtggtttgtttgccggatcaagagctaccaactctttttccgaaggtaactggcttcagcagagcgcagataccaaatactgttcttctagtgtagccgtagttaggccaccacttcaagaactctgtagcaccgcctacatacctcgctctgctaatcctgttaccagtggctgctgccagtggcgataagtcgtgtcttaccgggttggactcaagacgatagttaccggataaggcgcagcggtcgggctgaacggggggttcgtgcacacagcccagcttggagcgaacgacctacaccgaactgagatacctacagcgtgagctatgagaaagcgccacgcttcccgaagggagaaaggcggacaggtatccggtaagcggcagggtcggaacaggagagcgcacgagggagcttccagggggaaacgcctggtatctttatagtcctgtcgggtttcgccacctctgacttgagcgtcgatttttgtgatgctcgtcaggggggcggagcctatggaaaaacgccagcaacgcggcctttttacggttcctggccttttgctggccttttgctcacatgt

SEQ ID NO: 229 - DNA, 10343 bp, Artificial Sequence
  pSwap_ApoE_hAAT_HBB2m1(-ATG)_SERPING1coI21(-RIDD)_BGH228
cctgcaggcagctgcgcgctcgctcgctcactgaggccgcccgggcaaagcccgggcggcctcagtgagcgagcgagcgcgcagagagggagtggccaactccatcactaggggttcctgcggcctagtactaggctcagaggcacacaggagtttctgggctcaccctgcccccttccaacccctcagttcccatcctccagcagctgtttgtgtgctgcctctgaagtccacactgaacaaacttcagcctactcatgtccctaaaatgggcaaacattgcaagcagcaaacagcaaacacacagccctccctgcctgctgaccttggagctggggcagaggtcagagacctctctgggcccatgccacctccaacatccactcgaccccttggaatttcggtggagaggagcagaggttgtcctggcgtggtttaggtagtgtgagaggggtacccggggatcttgctaccagtggaacagccactaaggattctgcagtgagagcagagggccagctaagtggtactctcccagagactgtctgactcacgccaccccctccaccttggacacaggacgctgtggtttctgagccaggtacaatgactcctttcggtaagtgcagtggaagctgtacactgcccaggcaaagcgtccgggcagcgtaggcgggcgactcagatcccagccagtggacttagcccctgtttgctcctccgataactggggtgaccttggttaatattcaccagcagcctcccccgttgcccctctggatccactgcttaaatacggacgaggacagggccctgtctcctcagcttcaggcaccaccactgacctgggacagtgaatagatcctgagaacttcagggtgagtctttgggacccttgttgttttctttccccttcttttctttggttaagttcttgtcataggaaggggagaagtaacagggtacacatattgaccaaatcagggtaattttgcatttgtaattttaaaaattgctttcttcttttaatatacttttttgtttatcttatttctaatactttccctaatctctttctttcagggcaatattgatacattgtatcttgcctctttgcaccattctaaagaataacagtgataatttctgggttaaggcaatagcaatatttctgcatataaatatttctgcatataaattgtaactgttgtaagaggtttcatattgctaatagcagctacaatccagctaccattctgcttttattttctggttgggataaggctggattattctgagtccaagctaggcccttttgctaatcttgttcatacctcttatcttcctcccacagctcctgggcaacctgctggtctctctgctggcccatcactttggcaaagcactagtgccaccatggcctctaggctgactctgctgactctgctgctcctgctgctggctggggacagggccagctctaaccccaatgctacttctagctcctctcaggaccctgagagccttcaggacaggggggagggcaaggtggccaccactgtgatctctaagatgctgtttgtggagcccatcctggaggtgagcagcctgcccaccaccaacagcaccaccaactctgccactaagatcactgccaacaccactgatgagcccaccacccagcccactactgagcccaccacccagcctactatccagcccacccagcccactacccagctgcccactgacagccctacccagcccaccactggcagcttctgccctgggcctgtgaccctgtgctctgacctggagagccattctactgaggctgtgctgggggatgccctggtggacttctctctgaagctgtaccatgctttctctgccatgaagaaggtggagactaacatggcttttagccccttcagcattgctagcctgctgacccaggtgctgctgggggctggggagaacactaagaccaacctggaatctatcctgagctaccccaaggacttcacctgtgtgcaccaggccctgaagggcttcaccaccaagggggtgacctctgtgagccagatcttccacagccctgacctggccatcagggatacttttgtgaatgccagcagaaccctgtactcttctagccccagggtgctgagcaataattctgatgctaacctggagctgatcaatacctgggtggctaagaataccaacaacaagattagcaggctgctggactctctgccttctgataccaggctggtgctgctgaatgccatttacctgtctgccaagtggaagaccacttttgaccctaagaagactaggatggagcctttccacttcaagaactctgtcattaaggtgcccatgatgaacagcaagaagtatcctgtggcccactttattgaccagactctgaaggccaaggtgggccagcttcagctgagccataacctgagcctggtgatcctggtgccccagaacctgaagcataggctggaggacatggagcaggctctgagcccctctgtgttcaaggctattatggagaagctggagatgagcaagttccagcccactctgctgaccctgcccagaatcaaggtgaccacctctcaggacatgctgagcatcatggaaaagctggagttctttgacttttcttatgacctgaatctgtgtggcctgactgaggatcctgatcttcaggtgtctgccatgcagcaccagactgtgctggagctgactgagactggggtggaggctgctgctgcttctgccatctctgtggccaggaccctgctggtgtttgaggtgcagcagcccttcctgtttgtgctgtgggaccagcagcacaagtttcctgtgttcatgggcagggtgtatgaccccagagcctgaagatctagagctgaattccttcagccagggggatcagcctctactgtgccttctagttgccagccatctgttgtttgcccctcccccttgccttccttgaccctggaaggtgccactcccactgtcctttcctaataaaatgaggaaattgcatcacattgtctgagtaggtgtcattctattctggggggtggggtggggcaggacagcaagggggaggattgggaagacaatagcaggcatgctggggatgcagtgggctctatggcttctgaggcagaaagaaccagctggggctcgagatccactagggccgcaggaacccctagtgatggagttggccactccctctctgcgcgctcgctcgctcactgaggccgggcgaccaaaggtcgcccgacgcccgggctttgcccgggcggcctcagtgagcgagcgagcgcgcagctgcctgcaggggcccatgggcagatgcaccacctgtctcagtgcaaagccctgcctaagtaggctggtcataagaccatgtgtctggctgtaactccaattgattgtcagcatcaataaaacttggccaacactgttatatactggtattgatagttacaactgaacatatttgtttaagcaattggaattaagaattcacatgcaatgatatcagggtccttctcctctggttagtgtattggggggaaattggacatctctcagctcagtaggctagttaggccaggatggatgacatccacagcccctgggcagagagattatgatgtagctagtctgactcctgacaaagacttgcttcctggagcttctactactttctggtggatggctaagaaatatggttgtgttcttttaagtctgaagagcattatttttgccaacccctgaccaaacatccttgccaaggaaaaggcctaaaatatatttgcatttaaagatattacaaactacttggttttggaatgtttggcctttcaggatcatagctatcaaaatattagctatttggggtatgagatgtctgcttggtcaaggacaagttcttaaagacatcatgttggggaataatggggaaaatgggaaggcttatgctctgagtaagacatctgagttatcatctgtcaaacatttttgttagtcatagtctaatgggagcctgttttccctctttaatatacattcacatctgaatttatgctcttcattgacaatgccagcccagaacaacagctcttaccctttggttttcttcctaacctttaactccaatgtaaccattacctgccatttcagtaaaaccattattctccctacttacccacccaagttgtacaataaagagtgtttgctctcactcatatacaaagcaaattcatttgtttgtgatgtacagcttgctatgcccacagatgtggtttgcctagtcctttgctctaggtcatttgactgggaacagatgggatgctcactttggtttttaatggttaatctagtcattgaaatgcatttcatcaaataatcttagaggataattgtttaaatgtctgtccagactagctttgtagagccaggtgccattacacatgtcaccttcttatttctcttaattgaatttttatcatctgagataggaataatagagggctttttcaagtgaagatattactatagtctaaagaccttagtgtaacatcctggcccctaaggaaaaacaagttctggttcatacatataataactttgcatgttatctgccactgagatgtgtcctaatccaacagaaaggattgaatctctgtagctaggtgtacagggcaagagctgtacagggaacctttaaagatagcttcaggccaaagctgaggaaagtggatggagactggggaaaatgctaagacattttaaagattttctttaggtcaaaaatagaataagaaatagaccatttccctggacattttctgtaggttaatactgttgaactattggtaaatgcttatgctacaacttaatatgtctgctttgtgagtttagcattgtctccttgtcattccagaaatgaaatggcaaatacatttaaatcagaactaaaaaggggaacagggtataaaggctcaatttagtcacatcatttccctttctcacccaccccctttaaaccagatgtttgccaatgcattaacaatgcagatgtttcctgaaagaaagtttagtaactcaagcagacaccttattttcttttcaagcagaaaagactatgagatggtggttgtggttgttctgggagggagaagatataaatgatacacattatttcaaatcatttcatgacctcactgcacacttatagttattgtacctgttgtctttttgctgtcaagcctagctaagatcatttggaatgttcaagatcactcatacatgcatgtgcacacatacacatgcacatatgttcactccctatttcatccacatgaactaagattactgatgtgtacagattcaaagcacttttattcttttccaaaggcaagaagctgagctactttccagaatagttgtgaaagaccctgtcatacttctgcattgtttcctccacaccacctccatccagttccttatgaatggttactggttttcaaaaatatgagataaattgagtgtataaaagtcatttttagacaaaatgaaacaggaaatgaaagaaaccagaatctctcctcatttgtggatgggccagctccaccatgtcatggttaatctgcagggaggaaatactagatttgattgcagatcagactgcagcaaacctgctgtgactaaggcatcaagagaaagcaagcaacagctggggcttcagtggtgaaaacattatatatctagctttgaaatatgaaatactgtttagcagtgtcacctagaaaagagtgtttcaaaatgctgatgcttcataagaacctttctcttcagagttgtttcttttatctttcaaattagccagggtgggaaataaagtgatcacttggtgaagaaatctcacaaagaagaacatagagagttcactttcatctggagtaatgaacagattgaacaaactagaaatggttagtctgttaaagaaaaggtgtaggtgagctgtttgcaagagccacaagggaaaggggaagacaacttctttgtggacttaagggtgaaagttgcaagcaggcaagaccattctgacctccattaagaaagccctttccaaccaacaaccactgggttggttactcaggttgggcagcattgggagcaaatgttgattgaacaaatgtttgtcagaattgttgacttaaagagctgttctgtcactggggacagcagcagctagatagccccattcagggagagggcatttgttcacctggccagagatcagagcaggctaagggactgctgggatcctgtccagctttgagaccctacagagccatgttcacctagcaggtatcccttctgaggtcactctcatttcttaccttattccagggctttcacctcagcttgccaggctggagccaagggccaaggcagcctcaccttgttggctatggtagcttcccaggagccccctatggttcaggaacagctctgcctgccccatcctgtttgctacctcctaaagccaaaggcactggtgggccaggccagcttctaaagtcacacaaggttagaaggttcctgacaggaagggcttgaggccaatggaaggaggtacttcagtttccctccagatgcccagtgatgggctcagagctccttgagaacttgggaaaggaagcagggtctctgaagaaatacttcaggagtagaaagaggaagctagagggttaaatgcactacacaggaacagaaatgagtttttcttagagttagtatatgtcttagaggtgtagtaaactaaaacaagtcttgaattgcatacagccacttagggaagaaatgaaaacctttgaatattagtgaaaaaagggaaactgcaacccctgtattactagatagctttcatcaacagctcaaaacagacagatttttataggtttactgtgtgcactttaatacaagggcagtggttcagaacttagtcaggtcctgaaaaggatttaccaaatgttgagtgtgccctctagtgttcacacttcccagctttcttcctataaaggtggatcaaggcacttgcttacaactggaactgaaatcctccaagtggaactagacattgagatggagaaaatattcattgtccactgtaattatgcaaggaatatccagttgagataatggacttgcctcttatctaataatacccaggctcaatgggtcactgctttgtccactttgcccaaaattcaagcacagctaagttgatattttaggacaaaggcagcttactatccagccagaggggagtagaatatggttaagagagagtggaaagaatgaatgagccctgctattcctcactgcctggatggctataagcacagcccttatggaggccttaggtcttgcttcataatattccagtttgaaaagggtttgaaaagacctcctagaaaaatcagtagtttttctcttttgagtaacatgtagcaaaaaaaatttcatcatgtaggtacagggaacaccctaataactattaatctcaaggagtcaagccagtgtgtttcctaatgtatctgctgtatccccatgaagcaaattttgccatcagagaaactgactcatggggaaaaaatccaaggacctcaaatcaccaaaagaagccattcctcagatttgcctaagcttaagcttccctgtctctcattgtgtgttgctttcaatgcagttacataaatggcttttttgtttatgcaccaaaaacactaattcatctgcaaagctataggtcaaagcaaccatagtatgcaccctgctagctggcgcattaagcgcggcgggtgtggtggttacgcgcagcgtgaccgctacacttgccagcgccttagcgcccgctcctttcgctttcttcccttcctttctcgccacgttcgccggctttccccgtcaagctctaaatcgggggctccctttagggttccgatttagtgctttacggcacctcgaccccaaaaaacttgatttgggtgatggttcacgtagtgggccatcgccctgatagacggtttttcgccctttgacgttggagtccacgttctttaatagtggactcttgttccaaactggaacaacactcaactctatctcgggctattcttttgatttagacctgcaggcatgcaagcttggcactggccgtcgttttacaacgtcgtgactgggaaaaccctggcgttacccaacttaatcgccttgcagcacatccccctttcgccagctggcgtaatagcgaagaggcccgcaccgatcgcccttcccaacagttgcgcagcctgaatggcgaatgcgatttattcaacaaagccgccgtcccgtcaagtcagcgtaatgctctgccagtgttacaaccaattaaccaattctgattagaaaaactcatcgagcatcaaatgaaactgcaatttattcatatcaggattatcaataccatatttttgaaaaagccgtttctgtaatgaaggagaaaactcaccgaggcagttccataggatggcaagatcctggtatcggtctgcgattccgactcgtccaacatcaatacaacctattaatttcccctcgtcaaaaataaggttatcaagtgagaaatcaccatgagtgacgactgaatccggtgagaatggcaaaagcttatgcatttctttccagacttgttcaacaggccagccattacgctcgtcatcaaaatcactcgcatcaaccaaaccgttattcattcgtgattgcgcctgagcgagacgaaatacgcgatcgctgttaaaaggacaattacaaacaggaatcgaatgcaaccggcgcaggaacactgccagcgcatcaacaatattttcacctgaatcaggatattcttctaatacctggaatgctgttttcccggggatcgcagtggtgagtaaccatgcatcatcaggagtacggataaaatgcttgatggtcggaagaggcataaattccgtcagccagtttagtctgaccatctcatctgtaacatcattggcaacgctacctttgccatgtttcagaaacaactctggcgcatcgggcttcccatacaatcgatagattgtcgcacctgattgcccgacattatcgcgagcccatttatacccatataaatcagcatccatgttggaatttaatcgcggcttcgagcaagacgtttcccgttgaatatggctcataacaccccttgtattactgtttatgtaagcagacagttttattgttcatgatgatatatttttatcttgtgcaatgtaacatcagagattttgagacacaacgtggctttgttgaataaatcgaacttttgctgagttgaaggatcagatcacgcatcttcccgacaacgcagaccgttccgtggcaaagcaaaagttcaaaatcaccaactggtccacctacaacaaagctctcatcaaccgtggctccctcactttctggctggatgatggggcgattcaggcctggtatgagtcagcaacaccttcttcacgaggcagacctctcgacggagttccactgagcgtcagaccccgtagaaaagatcaaaggatcttcttgagatcctttttttctgcgcgtaatctgctgcttgcaaacaaaaaaaccaccgctaccagcggtggtttgtttgccggatcaagagctaccaactctttttccgaaggtaactggcttcagcagagcgcagataccaaatactgttcttctagtgtagccgtagttaggccaccacttcaagaactctgtagcaccgcctacatacctcgctctgctaatcctgttaccagtggctgctgccagtggcgataagtcgtgtcttaccgggttggactcaagacgatagttaccggataaggcgcagcggtcgggctgaacggggggttcgtgcacacagcccagcttggagcgaacgacctacaccgaactgagatacctacagcgtgagctatgagaaagcgccacgcttcccgaagggagaaaggcggacaggtatccggtaagcggcagggtcggaacaggagagcgcacgagggagcttccagggggaaacgcctggtatctttatagtcctgtcgggtttcgccacctctgacttgagcgtcgatttttgtgatgctcgtcaggggggcggagcctatggaaaaacgccagcaacgcggcctttttacggttcctggccttttgctggccttttgctcacatgt

SEQ ID NO: 230 - DNA, 2462 bp, Artificial Sequence
  SERPING1co21(Intron 2-3)(SINES_LINES) CpG free
atggcctctaggctgactctgctgactctgctgctcctgctgctggctggggtatgtggtcccttgtgggatgggggactggggtggagaggggaggcaggatggtggggggtgcctggggtggctgaggattaacccttcaggctggggggaatgaggagagctcctcttgggatcattgagtgtgatccttgcacaggcactggtagatgtatcaaagcaagagtttgttgtagaaaagagctgtggggaggagaggtttggctgctgtgacacagagggtggtcccaggctagggcctgtgaagacagggaagaatggtagcaaacataggtgggtctgggtgggggtcaatagcagtgagaggtcccagtggtctgggaggtcatggactagaaataaggctaagaagtgcaggatcccaggagaaaggtaggtaggggtgtgtgtatgtgggtgtgtgtgtgtgtgcacccccaagttggtatcacatactcagcctgcctatactacttctctctccctcccttcctgcctcccttctttcctccttccctttcttccttcccttcctaatgtgtactgttttttactgttctaaatcaaggagcacaagttcaaatgtctgtactagccaagcaagtgagtcaaacaggtagatatttacaggaaattgcaagaacatagataaatgacaacactcagcttcactgtttggaaaacaacttcctacagggcagtaattggtcagagattacagagtccctgactatccctcatcttctgcagagcacattcctgtgcacccccaccctcaccctgtattgccccttctctgaggaattagtggtggtggttctaagacagattgctcatctgccccactgtcagaaattactctcttgtacaggacattttccacatccacaccttctcttcctgctttgagtattttagaggactgtgcctgctagtaagaaaaaaatgaaactcagtttcttgaaccacaggacagggccagctctaaccccaatgctacttctagctcctctcaggaccctgagagcctgcaggacaggggggagggcaaggtggccaccactgtgatctctaagatgctgtttgtggagcccatcctggaggtgagcagcctgcccaccaccaacagcaccaccaactctgccactaagatcactgccaacaccactgatgagcccaccacccagcccactactgagcccaccacccagcctactatccagcccacccagcccactacccagctgcccactgacagccctacccagcccaccactggcagcttctgccctgggcctgtgaccctgtgctctgacctggagagccattctactgaggctgtgctgggggatgccctggtggacttctctctgaagctgtaccatgctttctctgccatgaagaaggtggagactaacatggcttttagccccttcagcattgctagcctgctgacccaggtgctgctgggggctggggagaacactaagaccaacctggaatctatcctgagctaccccaaggacttcacctgtgtgcaccaggccctgaagggcttcaccaccaagggggtgacctctgtgagccagatcttccacagccctgacctggccatcagggatacttttgtgaatgccagcagaaccctgtactcttctagccccagggtgctgagcaataattctgatgctaacctggagctgatcaatacctgggtggctaagaataccaacaacaagattagcaggctgctggactctctgccttctgataccaggctggtgctgctgaatgccatttacctgtctgccaagtggaagaccacttttgaccctaagaagactaggatggagcctttccacttcaagaactctgtcattaaggtgcccatgatgaacagcaagaagtatcctgtggcccactttattgaccagactctgaaggccaaggtgggccagctgcagctgagccataacctgagcctggtgatcctggtgccccagaacctgaagcataggctggaggacatggagcaggctctgagcccctctgtgttcaaggctattatggagaagctggagatgagcaagttccagcccactctgctgaccctgcccagaatcaaggtgaccacctctcaggacatgctgagcatcatggaaaagctggagttctttgacttttcttatgacctgaatctgtgtggcctgactgaggatcctgatctgcaggtgtctgccatgcagcaccagactgtgctggagctgactgagactggggtggaggctgctgctgcttctgccatctctgtggccaggaccctgctggtgtttgaggtgcagcagcccttcctgtttgtgctgtgggaccagcagcacaagtttcctgtgttcatgggcagggtgtatgaccccagagcctga

SEQ ID NO: 231 - DNA, 2158 bp, Artificial Sequence
  SERPING1co21(Intron 3-4)(SINES_LINES)CpG free
atggcctctaggctgactctgctgactctgctgctcctgctgctggctggggacagggccagctctaaccccaatgctacttctagctcctctcaggaccctgagagcctgcaggacaggggggagggcaaggtggccaccactgtgatctctaagatgctgtttgtggagcccatcctggaggtgagcagcctgcccaccaccaacagcaccaccaactctgccactaagatcactgccaacaccactgatgagcccaccacccagcccactactgagcccaccacccagcctactatccagcccacccagcccactacccagctgcccactgacagccctacccagcccaccactggcagcttctgccctgggcctgtgaccctgtgctctgacctggagagccattctactgaggctgtgctgggggatgccctggtggacttctctctgaagctgtaccatgctttctctgccatgaagaaggtggagactaacatggcttttagccccttcagcattgctagcctgctgacccaggtgctgctgggtaagaccctgcttgaattctctccaggtcatttgttggacactcccataagagtcaccaatccagacacttacaaagccatgcctctgggaagaagctgtaaaaatgggctattatatattgggggtggggtagagggatgtatcttttcattcttgaacattccatcatttcacagtgatgtaataggcaccattgcttgtaaaactctgtgactatacaagaacatataaaataaggtcccagccactaaccatgtttcatggcaaggagaggtgataagaaagatgaaattattatcagaagaagcagaaagccagcagcctagtgtctgacttagtgggaggtcaaaaaaatgtaaatcctctgccatcttgagggattactgtcaagtcccatttggtaattaccctaggaatggcacaaacaaattactacaagcagtggggacagagctattactccccagagagaattctaaaaaggctacagaatctttcttgagagattgagagaacacttccagctcagatgatctgtgatcccctccaaagcagggaataccctccattccagcctggtccccaaccctcattcccaaggaaggccccccactcatcctgcaagtatctttcatctctgccctttgttgcaggggctggggagaacactaagaccaacctggaatctatcctgagctaccccaaggacttcacctgtgtgcaccaggccctgaagggcttcaccaccaagggggtgacctctgtgagccagatcttccacagccctgacctggccatcagggatacttttgtgaatgccagcagaaccctgtactcttctagccccagggtgctgagcaataattctgatgctaacctggagctgatcaatacctgggtggctaagaataccaacaacaagattagcaggctgctggactctctgccttctgataccaggctggtgctgctgaatgccatttacctgtctgccaagtggaagaccacttttgaccctaagaagactaggatggagcctttccacttcaagaactctgtcattaaggtgcccatgatgaacagcaagaagtatcctgtggcccactttattgaccagactctgaaggccaaggtgggccagctgcagctgagccataacctgagcctggtgatcctggtgccccagaacctgaagcataggctggaggacatggagcaggctctgagcccctctgtgttcaaggctattatggagaagctggagatgagcaagttccagcccactctgctgaccctgcccagaatcaaggtgaccacctctcaggacatgctgagcatcatggaaaagctggagttctttgacttttcttatgacctgaatctgtgtggcctgactgaggatcctgatctgcaggtgtctgccatgcagcaccagactgtgctggagctgactgagactggggtggaggctgctgctgcttctgccatctctgtggccaggaccctgctggtgtttgaggtgcagcagcccttcctgtttgtgctgtgggaccagcagcacaagtttcctgtgttcatgggcagggtgtatgaccccagagcctga

SEQ ID NO: 232 - DNA, 1437 bp, Artificial Sequence
  Encoding SERPING1
aatccaaatgctaccagctccagctcccaggatccagagagtttgcaagacagaggcgaagggaaggtcgcaacaacagttatctccaagatgctattcgttgaacccatcctggaggtttccagcttgccgacaaccaactcaacaaccaattcagccaccaaaataacagctaataccactgatgaacccaccacacaacccaccacagagcccaccacccaacccaccatccaacccacccaaccaactacccagctcccaacagattctcctacccagcccactactgggtccttctgcccaggacctgttactctctgctctgacttggagagtcattcaacagaggccgtgttgggggatgctttggtagatttctccctgaagctctaccacgccttctcagcaatgaagaaggtggagaccaacatggccttttccccattcagcatcgccagcctccttacccaggtcctgctcggggctggggagaacaccaaaacaaacctggagagcatcctctcttaccccaaggacttcacctgtgtccaccaggccctgaagggcttcacgaccaaaggtgtcacctcagtctctcagattttccacagcccagacctggccataagggacacctttgtgaatgcctctcggaccctgtacagcagcagccccagagtcctaagcaacaacagtgacgccaacttggagctcatcaacacctgggtggccaagaacaccaacaacaagatcagccggctgctagacagtctgccctccgatacccgccttgtcctcctcaatgctatctacctgagtgccaagtggaagacaacatttgatcccaagaaaaccagaatggaaccctttcacttcaaaaactcagttataaaagtgcccatgatgaatagcaagaagtaccctgtggcccatttcattgaccaaactttgaaagccaaggtggggcagctgcagctctcccacaatctgagtttggtgatcctggtaccccagaacctgaaacatcgtcttgaagacatggaacaggctctcagcccttctgttttcaaggccatcatggagaaactggagatgtccaagttccagcccactctcctaacactaccccgcatcaaagtgacgaccagccaggatatgctctcaatcatggagaaattggaattcttcgatttttcttatgaccttaacctgtgtgggctgacagaggaccctgatcttcaggtttctgcgatgcagcaccagacagtgctggaactgacagagactggggtggaggcggctgcagcctccgccatctctgtggcccgcaccctgctggtctttgaagtgcagcagcccttcctcttcgtgctctgggaccagcagcacaagttccctgtcttcatggggcgagtatatgaccccagggcctga

SEQ ID NO: 233 - DNA, 1437 bp, Artificial Sequence
  Encoding SERPING1
aaccctaatgctacctctagctctagccaggaccctgagagcctgcaggataggggggagggcaaggtggccaccactgtgatcagcaagatgctgtttgtggagcctatcctggaggtgagcagcctgcccaccaccaactctactaccaactctgctaccaagatcactgccaataccactgatgaacccaccactcagcccactactgagcccaccacccagcccaccattcagcccactcagcccactacccagctgcctactgactctcccacccagcccaccactggcagcttttgtcctggccctgtgaccctgtgctctgacctggagagccattctactgaggctgtgctgggggatgccctggtggacttcagcctgaagctgtaccatgccttctctgccatgaagaaggtggagaccaacatggccttcagccccttctctattgcctctctgctgacccaggtgctgctgggggctggggagaatactaagaccaacctggagagcattctgagctatcccaaggacttcacctgtgtgcaccaggccctgaaggggttcactactaaaggggtgacctctgtgtctcagatcttccacagccctgacctggccatcagggacacttttgtgaatgccagcaggaccctgtacagcagcagccccagagtgctgagcaataattctgatgctaatctggagctgattaacacttgggtggccaagaacaccaacaacaagatctctaggctgctggattctctgccctctgacaccaggctggtgctgctgaatgccatctatctgtctgccaagtggaagaccacctttgatcccaagaagaccaggatggagcccttccatttcaagaactctgtgattaaagtgcccatgatgaactctaagaagtatcctgtggcccacttcattgatcagactctgaaggccaaggtggggcagctgcagctgagccacaacctgagcctggtgatcctggtgccccagaatctgaagcacaggctggaggacatggagcaggccctgagcccctctgtgttcaaggccatcatggagaagctggagatgagcaagttccagcccaccctgctgactctgcccagaattaaggtgaccaccagccaggacatgctgagcatcatggagaagctggagttctttgacttctcttatgacctgaacctgtgtggcctgactgaggatcctgacctgcaggtgtctgccatgcagcaccagactgtgctggagctgactgagactggggtggaggctgctgctgcctctgccatttctgtggccaggaccctgctggtgtttgaggtgcagcagcccttcctgtttgtgctgtgggaccagcagcacaagtttcctgtgtttatgggcagggtgtatgaccctagggcctga

SEQ ID NO: 234 - DNA, 1437 bp, Artificial Sequence
  Encoding SERPING1
aaccctaatgccacctccagcagcagccaggaccctgagagcctgcaggataggggggagggcaaggtggctactactgtgatcagcaagatgctgtttgtggagcctatcctggaggtgagcagcctgcccaccactaactctactactaattctgccactaagatcactgccaataccactgatgagccaaccactcagcccaccactgagcccaccacccagcccaccattcagcccactcagcctaccacccagctgcctactgacagccccactcagcccactactggctctttctgtcctgggcctgtgactctgtgctctgacctggaatcccacagcactgaggctgtgctgggggatgccctggtggatttcagcctgaagctgtaccatgctttctctgccatgaagaaggtggagaccaacatggccttcagccctttctctattgccagcctgctgactcaggtgctgctgggggctggggagaataccaagaccaacctggagtctatcctgagctatcccaaggacttcacttgtgtgcaccaggccctgaaggggttcaccaccaagggggtgacctctgtgtctcagatctttcacagccctgacctggccatcagggatacctttgtgaatgccagcaggaccctgtacagcagcagccccagggtgctgagcaacaactctgatgccaacctggagctgatcaacacctgggtggccaagaacaccaacaacaagatcagcaggctgctggacagcctgccctctgataccaggctggtgctgctgaatgccatctacctgtctgctaagtggaagaccacttttgatcctaagaagaccaggatggagccctttcacttcaagaactctgtgatcaaggtgcccatgatgaactctaagaaataccctgtggcccacttcattgatcagaccctgaaggccaaggtgggccagctgcagctgagccacaacctgagcttggtgatcctggtgcctcagaacctgaagcacaggctggaggacatggagcaggccctgagcccctctgtgttcaaggccattatggagaagctggagatgagcaagttccagcctaccctgctgaccctgcccaggatcaaggtgactactagccaggatatgctgagcatcatggagaagctggagttttttgatttcagctatgacctgaacctgtgtggcctgactgaggaccctgacctgcaggtgtctgccatgcagcatcagactgtgctggagctgactgagactggggtggaggctgctgctgcctctgccatctctgtggccaggaccctgctggtgtttgaggtgcagcagcctttcctgtttgtgctgtgggatcagcagcacaagtttcctgtgttcatgggcagggtgtatgaccccagggcttga

SEQ ID NO: 235 - DNA, 1437 bp, Artificial Sequence
  Encoding SERPING1
aaccctaatgctacctctagctctagccaggaccctgagagcctgcaggataggggggagggcaaggtggccaccactgtgatcagcaagatgctgtttgtggagcctatcctggaggtgagcagcctgcccaccaccaactctactaccaactctgctaccaagatcactgccaataccactgatgaacccaccactcagcccactactgagcccaccacccagcccaccattcagcccactcagcccactacccagctgcctactgactctcccacccagcccaccactgggagcttctgtccaggccctgtgactctgtgttctgacctggagagccacagcactgaagctgtgctgggggatgctctggtggacttcagcctgaagctgtaccatgccttctctgccatgaagaaggtggaaaccaacatggcctttagccccttcagcattgctagcctgctgactcaggtgctgctgggggctggggagaacactaagactaacctggagtctatcctgtcttatcccaaggacttcacctgtgtgcatcaggccctgaaggggttcaccaccaagggggtcacctctgtgagccagatctttcacagccctgatctggccatcagggacacctttgtgaatgcctctaggactctgtacagcagcagccccagggtgctgagcaacaactctgatgccaacctggagctgatcaacacctgggtggccaagaacactaacaacaagatcagcaggctgctggacagcctgccctctgacactaggctggtgctgctgaatgccatctatctgtctgccaagtggaagaccacctttgaccccaagaagactaggatggagccctttcattttaagaactctgtgatcaaggtgcccatgatgaacagcaagaaataccctgtggcccatttcattgaccagactctgaaggctaaggtgggccagctgcagctgagccacaacctgagcctggtgatcctggtgccacagaatctgaagcacaggctggaggacatggagcaggctctgtctccctctgtgttcaaggccatcatggagaagctggagatgtctaagttccagcccaccctgctgaccctgcccaggatcaaggtgaccacttctcaggacatgctgtctatcatggagaagctggagttttttgacttttcttatgacctgaacctgtgtggcctgactgaggaccctgatctgcaggtgtctgccatgcagcaccagactgtgctggagctgactgagactggggtggaggctgctgctgcttctgccatttctgtggctaggactctgctggtgtttgaggtgcagcagcccttcctgtttgtgctgtgggaccagcagcacaagttccctgtgttcatgggcagggtgtatgatcccagggcttga

SEQ ID NO: 236 - DNA, 1437 bp, Artificial Sequence
  Encoding SERPING1
aaccctaatgctacctctagctctagccaggaccctgagagcctgcaggataggggggagggcaaggtggccaccactgtgatcagcaagatgctgtttgtggagcctatcctggaggtgagcagcctgcccaccaccaactctactaccaactctgctaccaagatcactgccaataccactgatgaacccaccactcagcccactactgagcccaccacccagcccaccattcagcccactcagcccactacccagctgcctactgactctcccacccagcccaccactggcagcttctgccctgggcctgtgaccctgtgctctgacctggagagccattctactgaggctgtgctgggggatgccctggtggatttcagcctgaagctgtaccatgccttctctgccatgaagaaggtggagaccaacatggccttctctcccttcagcattgccagcctgctgacccaggtgctgctgggggctggggagaacaccaagaccaacctggagagcatcctgtcttaccccaaggacttcacctgtgtgcatcaggccctgaagggcttcactactaagggggtgacctctgtgtctcagattttccacagccctgacctggctattagggacacttttgtgaatgcttctaggaccctgtacagcagctctcccagggtgctgagcaacaactctgatgccaacctggagctgattaacacttgggtggccaagaacactaacaataagatcagcaggctgctggacagcctgccctctgacaccaggctggtgctgctgaatgccatctacctgtctgccaagtggaagactacttttgatcctaagaagaccaggatggagcctttccacttcaagaactctgtgatcaaggtgcccatgatgaattctaagaagtaccctgtggctcacttcattgaccagaccctgaaggccaaggtgggccagctgcagctgagccacaacctgagcctggtgattctggtgccccagaacctgaagcacaggctggaggacatggagcaggccctgagcccctctgtgttcaaggccatcatggagaagctggagatgagcaagttccagcctactctgctgactctgcccaggatcaaggtgaccactagccaggacatgctgagcattatggagaagctggagttctttgacttttcttatgatctgaacctgtgtggcctgactgaggaccctgacctgcaggtgtctgccatgcagcaccagactgtgctggagctgactgagactggggtggaggctgctgctgcctctgccatctctgtggctaggaccctgctggtgtttgaggtgcagcagcccttcctgtttgtgctgtgggaccagcagcacaagttccctgtcttcatgggcagggtgtatgatcccagggcttga

SEQ ID NO: 237 - DNA, 1437 bp, Artificial Sequence
  Encoding SERPING1
aaccccaatgctactagcagcagcagccaggatcctgagagcctgcaggacagaggggaagggaaggtggccaccactgtgatcagcaagatgctgtttgtggagcctatcctggaggtgagctctctgcccaccactaacagcaccaccaattctgctactaagatcactgccaacaccactgatgagcccaccacccagcctaccactgagccaactacccagcccaccatccagcccacccagcccaccactcagctgcctactgattctcctactcagcctaccactgggagcttctgccctgggcctgtgaccctgtgctctgacctggagtctcattctactgaggctgtgctgggggatgccctggtggacttcagcctgaagctgtaccatgctttctctgccatgaagaaggtggagactaacatggccttctctcctttctctattgccagcctgctgactcaggtgctgctgggggctggggagaataccaagactaacctggagagcatcctgtcttatcctaaggacttcacttgtgtgcatcaggccctgaagggcttcaccaccaagggggtgacttctgtgagccagattttccacagccctgacctggccatcagagacacctttgtgaatgccagcaggaccctgtattctagctctcccagggtgctgagcaacaactctgatgccaatctggaactgatcaacacttgggtggccaagaacaccaacaacaagatcagcaggctgctggatagcctgccctctgacaccaggctggtgctgctgaatgccatctacctgtctgccaagtggaagaccacctttgaccccaagaagactaggatggagcccttccacttcaagaactctgtgatcaaggtgcccatgatgaatagcaagaagtaccctgtggcccacttcattgaccagaccctgaaggccaaggtggggcagctgcagctgagccacaacctgagcctggtgatcctggtgccccagaacctgaagcacagactggaggacatggagcaggccctgagcccatctgtgttcaaggctattatggagaagctggagatgtctaagtttcagcctaccctgctgaccctgcccaggatcaaggtgactaccagccaggacatgctgagcatcatggagaagctggaattctttgacttcagctatgatctgaatctgtgtggcctgactgaagaccctgatttgcaggtgtctgctatgcagcaccagactgtgctggaactgactgagactggggtggaggctgctgctgcctctgccatctctgtggccaggaccctgctggtgtttgaggtgcagcagcctttcctgtttgtgctgtgggatcagcagcacaagttccctgtgttcatgggcagggtgtatgaccctagggcttga

SEQ ID NO: 238 - DNA, 1437 bp, Artificial Sequence
  Encoding SERPING1
aaccccaatgctacttctagctcctctcaggaccctgagagcctgcaggacaggggggagggcaaggtggccaccactgtgatctctaagatgctgtttgtggagcccatcctggaggtgagcagcctgcccaccaccaacagcaccaccaactctgccactaagatcactgccaacaccactgatgagcccaccacccagcccactactgagcccaccacccagcctactatccagcccacccagcccactacccagctgcccactgacagccctacccagcccaccactggcagcttctgccctgggcctgtgaccctgtgctctgacctggagagccattctactgaggctgtgctgggggatgccctggtggacttctctctgaagctgtaccatgctttctctgccatgaagaaggtggagactaacatggcttttagccccttcagcattgctagcctgctgacccaggtgctgctgggggctggggagaacactaagaccaacctggaatctatcctgagctaccccaaggacttcacctgtgtgcaccaggccctgaagggcttcaccaccaagggggtgacctctgtgagccagatcttccacagccctgacctggccatcagggatacttttgtgaatgccagcagaaccctgtactcttctagccccagggtgctgagcaataattctgatgctaacctggagctgatcaatacctgggtggctaagaataccaacaacaagattagcaggctgctggactctctgccttctgataccaggctggtgctgctgaatgccatttacctgtctgccaagtggaagaccacttttgaccctaagaagactaggatggagcctttccacttcaagaactctgtcattaaggtgcccatgatgaacagcaagaagtatcctgtggcccactttattgaccagactctgaaggccaaggtgggccagctgcagctgagccataacctgagcctggtgatcctggtgccccagaacctgaagcataggctggaggacatggagcaggctctgagcccctctgtgttcaaggctattatggagaagctggagatgagcaagttccagcccactctgctgaccctgcccagaatcaaggtgaccacctctcaggacatgctgagcatcatggaaaagctggagttctttgacttttcttatgacctgaatctgtgtggcctgactgaggatcctgatctgcaggtgtctgccatgcagcaccagactgtgctggagctgactgagactggggtggaggctgctgctgcttctgccatctctgtggccaggaccctgctggtgtttgaggtgcagcagcccttcctgtttgtgctgtgggaccagcagcacaagtttcctgtgttcatgggcagggtgtatgaccccagagcctga

SEQ ID NO: 239 - protein, 1437 aa, Artificial Sequence
  Encoding SERPING1
AATCCCAATGCCACCTCTAGCTCTAGCCAGGATCCTGAGAGCCTGCAGGACAGGGGGGAGGGCAAGGTGGCCACCACTGTGATCAGCAAGATGCTGTTTGTGGAGCCCATTCTGGAGGTGTCTTCTCTGCCCACCACCAATAGCACCACTAATTCTGCCACCAAGATCACTGCTAACACCACTGATGAGCCCACCACTCAGCCTACCACTGAGCCCACCACCCAGCCCACTATCCAGCCCACCCAGCCCACCACCCAGCTGCCTACTGACAGCCCTACCCAGCCCACTACTGGGAGCTTCTGCCCTGGCCCTGTGACCCTGTGCTCTGACCTGGAGAGCCACAGCACTGAGGCTGTGCTGGGGGATGCCCTGGTGGACTTCAGCCTGAAGCTGTACCATGCCTTTTCTGCCATGAAGAAGGTGGAGACCAACATGGCCTTTAGCCCTTTCAGCATTGCCAGCCTGCTGACTCAGGTGCTGCTGGGGGCTGGGGAGAACACCAAGACCAACCTGGAGAGCATCCTGAGCTACCCCAAGGACTTCACTTGTGTGCACCAGGCCCTGAAGGGCTTCACTACCAAGGGGGTGACTTCTGTGAGCCAGATCTTCCACAGCCCTGACCTGGCCATCAGGGATACTTTTGTGAATGCCAGCAGGACCCTGTACAGCAGCAGCCCCAGGGTGCTGAGCAACAACTCTGATGCTAACCTGGAGCTGATCAATACTTGGGTGGCCAAGAACACCAACAACAAGATTTCTAGGCTGCTGGACTCTCTGCCCTCTGACACTAGGCTGGTGCTGCTGAATGCCATCTACCTGTCTGCCAAGTGGAAGACCACCTTTGATCCCAAGAAGACTAGGATGGAGCCCTTCCACTTCAAGAACTCTGTGATCAAGGTGCCCATGATGAACAGCAAGAAGTACCCTGTGGCCCATTTCATTGACCAGACCCTGAAGGCCAAGGTGGGGCAGCTGCAGCTGAGCCACAATCTGAGCCTGGTGATTCTGGTGCCCCAGAATCTGAAGCACAGACTGGAGGACATGGAGCAGGCTCTGTCTCCCTCTGTGTTCAAGGCCATCATGGAGAAGCTGGAGATGAGCAAGTTCCAGCCCACTCTGCTGACTCTGCCTAGGATCAAGGTGACCACCAGCCAGGACATGCTGAGCATTATGGAGAAGCTGGAGTTCTTTGACTTCAGCTATGACCTGAACCTGTGTGGCCTGACTGAGGACCCTGATCTGCAGGTGTCTGCCATGCAGCACCAGACTGTGCTGGAGCTGACTGAGACTGGGGTGGAGGCTGCTGCTGCCTCTGCTATTTCTGTGGCCAGGACCCTGCTGGTGTTTGAGGTGCAGCAGCCCTTCCTGTTTGTGCTGTGGGACCAGCAGCACAAGTTTCCTGTGTTCATGGGGAGGGTGTATGACCCCAGGGCCTGA

SEQ ID NO: 240 - DNA, 1437 bp, Artificial Sequence
  Encoding SERPING1
aatccaaatgctaccagctcctcctcccaggatcctgaatcccttcaagacaggggggagggcaaggtggcaactactgtgatttccaagatgctgtttgtggagcccatcctggaggttagcagccttcctactaccaactcaacaaccaattcagccaccaaaattacagctaataccacagatgagccaacaactcaacccaccactgagcccaccactcagccaaccatccaacccacccaaccaactacccagctcccaacagattctcctacccagcctaccactggctccttctgcccaggacctgttactctctgctctgacttggaaagccattctactgaggctgtcctgggggatgctttggtagacttctccctgaagctctaccatgcattttcagcaatgaagaaggtggagaccaacatggccttttccccattcagtatagcaagtctcctgactcaggtcctgctgggggcaggggagaatacaaagaccaacctggagagcatcctcagttatcccaaggacttcacctgtgtccaccaggccctgaagggcttcacaacaaagggggtgacctcagtctctcagattttccacagcccagacctggccataagggacacctttgtgaatgcctctaggaccctgtactcaagctcccccagagtcctaagcaacaacagtgatgcaaatttggagctcatcaacacctgggtggccaagaacaccaacaacaagatcagcaggctgctagacagtctgccaagtgatacaaggcttgtcctcctcaatgctatctacctgagtgccaagtggaagacaacatttgatcccaagaaaaccagaatggaaccctttcacttcaaaaactcagttataaaagtgcccatgatgaatagcaagaagtaccctgtggcccatttcattgaccaaactttgaaagccaaggtggggcagctgcagctctcccacaatctgagtctggtaatcctggtaccccagaacctgaaacataggcttgaagacatggaacaggctctcagcccttctgttttcaaggccataatggagaagctggagatgtccaagttccagcccactctcctaacactacccaggatcaaagtgacaaccagccaggatatgctctcaatcatggagaaattggaattttttgatttttcttatgaccttaacctgtgtgggctgacagaggaccctgatcttcaggtttctgcaatgcagcaccagacagtgctggaactgacagagactggggtggaagctgctgcagcaagtgcaatatctgtggccagaaccctgctggtctttgaagtgcagcagcccttcctgtttgtgctgtgggaccagcagcacaagttccctgtcttcatggggagggtatatgaccccagggcctga

SEQ ID NO: 241 - DNA, 1437 bp, Artificial Sequence
  Encoding SERPING1
aaccccaatgcaaccagcagttcctctcaggatccagagtccctgcaggacaggggggagggcaaggtggccaccactgtgatctccaagatgctgtttgtggagcccatcctggaggtatccagcctccctaccaccaacagcaccaccaactcagccaccaaaatcactgctaacaccactgatgagcccacaacccagccaactactgagccaaccactcagcctaccatccaacccacccagcctactacccagctccccactgactctcctacccagcccaccactggcagcttctgcccaggacctgtgaccctctgctctgacttggagtcccattccacagaggcagtgctgggggatgccctggtagacttctccctgaagctctaccatgcattctctgccatgaagaaggtggagaccaacatggccttctcccccttcagcattgccagcctcctgacccaggtcctgctgggggcaggggagaacacaaagacaaacctggagtccatcctcagctaccccaaggacttcacctgtgtccaccaggccctgaagggcttcacaaccaagggggtgaccagtgtctcacagattttccacagcccagacctggccatcagggacacctttgtgaatgccagtaggaccctgtacagctccagtcccagagtcctcagcaacaactctgatgccaacctggagctgatcaacacctgggtggccaagaacaccaacaacaagatcagcaggctgctagactcactgccctctgacacaaggctggtcctcctcaatgcaatctacctgagtgccaagtggaagaccacctttgaccccaagaagaccaggatggagcccttccacttcaagaacagtgtcattaaggtgcccatgatgaacagcaagaagtaccctgtggcccacttcattgaccagaccttgaaggccaaggtggggcagctgcagctctcccacaacctgtcactggtcatcctggttccccagaacctgaagcacaggcttgaggacatggagcaggccctcagcccttctgtattcaaggccataatggagaagctggagatgagcaagttccagcccactctgctgaccctacccaggatcaaggtgaccaccagccaggacatgctctcaatcatggagaagttggagttctttgacttcagctatgacctgaacctgtgtgggctgacagaggaccctgacctgcaggtgtcagccatgcagcaccagacagtgctggaactgacagagactggggtggaagctgctgcagcaagtgctatttcagtggccaggaccctgctggtctttgaggtccagcagcccttcctgtttgtgctctgggaccagcagcacaagttccctgtcttcatggggagggtctatgaccccagggcctga

SEQ ID NO: 242 - DNA, 1437 bp, Artificial Sequence
  Encoding SERPING1
aaccccaatgccaccagctccagctctcaggacccagagagcctgcaggacaggggggagggcaaggtggccaccacagtgatcagcaagatgctgtttgtggagcccatcctggaggtgagcagcctccccaccaccaacagcaccaccaattctgccaccaagatcacagccaacaccacagatgagcccacaacccagcctaccacagagccaaccacacagcccaccatccaacccacccaacctactacccagctgcccacagacagccctacccagcctaccacaggcagcttctgccctggccctgtgaccctgtgctctgacttggagagccactccacagaggctgtgctgggggatgccctggtggatttcagcctgaagctgtaccatgccttctctgccatgaagaaggtggagaccaacatggccttcagccccttcagcattgccagcctcctgacccaggtcctgctgggggctggggagaacacaaagaccaacctggagagcatcctgagctaccccaaggacttcacctgtgtgcaccaggccctgaagggcttcaccaccaagggggtgacctctgtgagccagattttccacagccctgacctggccatcagggacacctttgtgaatgcctccaggaccctgtacagctctagccccagggtgctgagcaacaactctgatgccaacttggagctgatcaacacctgggtggccaagaacaccaacaacaagatcagcaggctgctggacagcctgccctctgacaccaggctggtgctcctgaatgccatctacctgtctgccaagtggaagaccacctttgaccccaagaagaccagaatggagcccttccacttcaagaactctgtgataaaggtgcccatgatgaacagcaagaagtaccctgtggcccacttcattgaccagaccctgaaagccaaggtgggccagctgcagctcagccacaacctgagcctggtcatcctggtgccccagaacctgaagcacaggctggaggacatggaacaggccctcagcccctctgtgttcaaggccattatggagaagctggagatgagcaagttccagcccactctgctgacactgcccaggatcaaggtgaccaccagccaggacatgctgagcatcatggagaagttggagttctttgacttcagctatgacctgaacctgtgtggcctgacagaggaccctgacctccaggtgtctgccatgcagcaccagacagtgctggaactgacagagacaggggtggaagctgctgctgcctctgccatctctgtggccagaaccctgctggtgtttgaggtgcagcagcccttcctgtttgtgctgtgggaccagcagcacaagttccctgtgttcatgggcagggtgtatgaccccagggcctga

SEQ ID NO: 243 - DNA, 1437 bp, Artificial Sequence
  Encoding SERPING1
aaccccaatgctacttctagctcctctcaggaccctgagagccttcaggacaggggggagggcaaggtggccaccactgtgatctctaagatgctgtttgtggagcccatcctggaggtgagcagcctgcccaccaccaacagcaccaccaactctgccactaagatcactgccaacaccactgatgagcccaccacccagcccactactgagcccaccacccagcctactatccagcccacccagcccactacccagctgcccactgacagccctacccagcccaccactggcagcttctgccctgggcctgtgaccctgtgctctgacctggagagccattctactgaggctgtgctgggggatgccctggtggacttctctctgaagctgtaccatgctttctctgccatgaagaaggtggagactaacatggcttttagccccttcagcattgctagcctgctgacccaggtgctgctgggggctggggagaacactaagaccaacctggaatctatcctgagctaccccaaggacttcacctgtgtgcaccaggccctgaagggcttcaccaccaagggggtgacctctgtgagccagatcttccacagccctgacctggccatcagggatacttttgtgaatgccagcagaaccctgtactcttctagccccagggtgctgagcaataattctgatgctaacctggagctgatcaatacctgggtggctaagaataccaacaacaagattagcaggctgctggactctctgccttctgataccaggctggtgctgctgaatgccatttacctgtctgccaagtggaagaccacttttgaccctaagaagactaggatggagcctttccacttcaagaactctgtcattaaggtgcccatgatgaacagcaagaagtatcctgtggcccactttattgaccagactctgaaggccaaggtgggccagcttcagctgagccataacctgagcctggtgatcctggtgccccagaacctgaagcataggctggaggacatggagcaggctctgagcccctctgtgttcaaggctattatggagaagctggagatgagcaagttccagcccactctgctgaccctgcccagaatcaaggtgaccacctctcaggacatgctgagcatcatggaaaagctggagttctttgacttttcttatgacctgaatctgtgtggcctgactgaggatcctgatcttcaggtgtctgccatgcagcaccagactgtgctggagctgactgagactggggtggaggctgctgctgcttctgccatctctgtggccaggaccctgctggtgtttgaggtgcagcagcccttcctgtttgtgctgtgggaccagcagcacaagtttcctgtgttcatgggcagggtgtatgaccccagagcctga

SEQ ID NO: 244 - DNA, 1215 bp, Artificial Sequence
  Encoding SERPING1
aatcccaccatccaacccacccaaccaactacccagctcccaacagattctcctacccagcccactactgggtccttctgcccaggacctgttactctctgctctgacttggagagtcattcaacagaggccgtgttgggggatgctttggtagatttctccctgaagctctaccacgccttctcagcaatgaagaaggtggagaccaacatggccttttccccattcagcatcgccagcctccttacccaggtcctgctcggggctggggagaacaccaaaacaaacctggagagcatcctctcttaccccaaggacttcacctgtgtccaccaggccctgaagggcttcacgaccaaaggtgtcacctcagtctctcagattttccacagcccagacctggccataagggacacctttgtgaatgcctctcggaccctgtacagcagcagccccagagtcctaagcaacaacagtgacgccaacttggagctcatcaacacctgggtggccaagaacaccaacaacaagatcagccggctgctagacagtctgccctccgatacccgccttgtcctcctcaatgctatctacctgagtgccaagtggaagacaacatttgatcccaagaaaaccagaatggaaccctttcacttcaaaaactcagttataaaagtgcccatgatgaatagcaagaagtaccctgtggcccatttcattgaccaaactttgaaagccaaggtggggcagctgcagctctcccacaatctgagtttggtgatcctggtaccccagaacctgaaacatcgtcttgaagacatggaacaggctctcagcccttctgttttcaaggccatcatggagaaactggagatgtccaagttccagcccactctcctaacactaccccgcatcaaagtgacgaccagccaggatatgctctcaatcatggagaaattggaattcttcgatttttcttatgaccttaacctgtgtgggctgacagaggaccctgatcttcaggtttctgcgatgcagcaccagacagtgctggaactgacagagactggggtggaggcggctgcagcctccgccatctctgtggcccgcaccctgctggtctttgaagtgcagcagcccttcctcttcgtgctctgggaccagcagcacaagttccctgtcttcatggggcgagtatatgaccccagggcctga

SEQ ID NO: 245 - DNA, 1149 bp, Artificial Sequence
  Encoding SERPING1
aatgggtccttctgcccaggacctgttactctctgctctgacttggagagtcattcaacagaggccgtgttgggggatgctttggtagatttctccctgaagctctaccacgccttctcagcaatgaagaaggtggagaccaacatggccttttccccattcagcatcgccagcctccttacccaggtcctgctcggggctggggagaacaccaaaacaaacctggagagcatcctctcttaccccaaggacttcacctgtgtccaccaggccctgaagggcttcacgaccaaaggtgtcacctcagtctctcagattttccacagcccagacctggccataagggacacctttgtgaatgcctctcggaccctgtacagcagcagccccagagtcctaagcaacaacagtgacgccaacttggagctcatcaacacctgggtggccaagaacaccaacaacaagatcagccggctgctagacagtctgccctccgatacccgccttgtcctcctcaatgctatctacctgagtgccaagtggaagacaacatttgatcccaagaaaaccagaatggaaccctttcacttcaaaaactcagttataaaagtgcccatgatgaatagcaagaagtaccctgtggcccatttcattgaccaaactttgaaagccaaggtggggcagctgcagctctcccacaatctgagtttggtgatcctggtaccccagaacctgaaacatcgtcttgaagacatggaacaggctctcagcccttctgttttcaaggccatcatggagaaactggagatgtccaagttccagcccactctcctaacactaccccgcatcaaagtgacgaccagccaggatatgctctcaatcatggagaaattggaattcttcgatttttcttatgaccttaacctgtgtgggctgacagaggaccctgatcttcaggtttctgcgatgcagcaccagacagtgctggaactgacagagactggggtggaggcggctgcagcctccgccatctctgtggcccgcaccctgctggtctttgaagtgcagcagcccttcctcttcgtgctctgggaccagcagcacaagttccctgtcttcatggggcgagtatatgaccccagggcctga

SEQ ID NO: 246 - DNA, 1437 bp, Artificial Sequence; identical to SEQ ID NO: 238
  Encoding SERPING1

SEQ ID NO: 247 - DNA, 1437 bp, Artificial Sequence; identical to SEQ ID NO: 238
  Encoding SERPING1

SEQ ID NO: 248 - DNA, 3094 bp, Artificial Sequence
  Encoding SERPING1
aaccccaatgctacttctagctcctctcaggaccctgagagcctgcaggacaggggggagggcaaggtggccaccactgtgatctctaagatgctgtttgtggagcccatcctggaggtgagcagcctgcccaccaccaacagcaccaccaactctgccactaagatcactgccaacaccactgatgagcccaccacccagcccactactgagcccaccacccagcctactatccagcccacccagcccactacccagctgcccactgacagccctacccagcccaccactggcagcttctgccctgggcctgtgaccctgtgctctgacctggagagccattctactgaggctgtgctgggggatgccctggtggacttctctctgaagctgtaccatgctttctctgccatgaagaaggtggagactaacatggcttttagccccttcagcattgctagcctgctgacccaggtgctgctgggtaagaccctgcttgaattctctccaggtcatttgttggacactcccataagagtcaccaatccagacacttacaaagccatgcctctgggaagaagctgtaaaaatgggctattatatattgggggtggggtagagggatgtatcttttcattcttgaacattccatcatttcacagtgatgtaataggcacgattgcttgtaaaactctgtgactatacaagaacatataaaataaggtcgcagccactaaccatgtttcatggcaaggagaggtgataagaaagatgaaattaggcgcagtggctcacgcctgtaatcccagcactttgggaggccaaggcgggtggatcacctgaggtcaggagttcaagaccagcctggccaacatggtgaaaccctgtctctactaaaaatacaaaaattatcagggagtggtggtgcatgcctgtaatcccagctacttgggcagctgaggcaggagaatcgcttgaacccaggaggtggaggttgcagtgagccgagaccgcaccattgcactacagtctgggtgacagagcgagactctgtctcaaaaaaaaaaaaaaattatcagagatagacctagagtagatgtggttagtactgccttctagctctgtgaccttgggcagatcactttaacctctctgagccttgagtcctcttgtgtaaaatagtgatgatgctatctacctcaaaagattaagaagcagaaagccaggccggatgcggtggttcacacctgtaatcccagcattttaggaggccgaggcgggcagatcacgaggtcaggagttcgagaccagcctgactaacatggtgaaaccccgtctctactaaaaataaaaagaaattagctaggcatggtggtgcacacctgtaaccccagctactcaggaggctgaggcaggagaatcacttgaacacgggaggcagaggttgcagtgagccgaaatcatgccactgcactccagcctgggaagactgagcaagactctgtctcaaaaaaaaaaaagaagcagcctagtgtctgacttagtgggaggtcaaaaaaatgtaaatcctctgccatcttgagggattactgtcaagtcccatttggtaattaccctaggaatggcacaaacaaattactacaagcagtggggacagagctattactccccagagagaattctaaaaaggctacagaatctttcttggctgggcacggtgactcacacctataatcctggcactttgggaggccaaggcaggagttcaagaccagcctggccaacatgttgaaaccccatctctactaaaaatgcaaaaattagccaggcatagtgatgcatgcttattgtcccagctacttgggaggcagaggtgggaggattgcttgaacctggagattcaagtgagctgagattgcaccactgcattccagcctgggcaacaaagcaagactctgtctcaaaaaaaaaaaaaaaaaaaaaaaaaagagagattgagagaacacttccagctcagatgatctgtgatcccctccaaagcagggaataccctccattccagcctggtccccaaccctcattcccaaggaaggcccccgactcatcctgcaagtatctttcatctctgccctttgttgcaggggctggggagaacactaagaccaacctggaatctatcctgagctaccccaaggacttcacctgtgtgcaccaggccctgaagggcttcaccaccaagggggtgacctctgtgagccagatcttccacagccctgacctggccatcagggatacttttgtgaatgccagcagaaccctgtactcttctagccccagggtgctgagcaataattctgatgctaacctggagctgatcaatacctgggtggctaagaataccaacaacaagattagcaggctgctggactctctgccttctgataccaggctggtgctgctgaatgccatttacctgtctgccaagtggaagaccacttttgaccctaagaagactaggatggagcctttccacttcaagaactctgtcattaaggtgcccatgatgaacagcaagaagtatcctgtggcccactttattgaccagactctgaaggccaaggtgggccagctgcagctgagccataacctgagcctggtgatcctggtgccccagaacctgaagcataggctggaggacatggagcaggctctgagcccctctgtgttcaaggctattatggagaagctggagatgagcaagttccagcccactctgctgaccctgcccagaatcaaggtgaccacctctcaggacatgctgagcatcatggaaaagctggagttctttgacttttcttatgacctgaatctgtgtggcctgactgaggatcctgatctgcaggtgtctgccatgcagcaccagactgtgctggagctgactgagactggggtggaggctgctgctgcttctgccatctctgtggccaggaccctgctggtgtttgaggtgcagcagcccttcctgtttgtgctgtgggaccagcagcacaagtttcctgtgttcatgggcagggtgtatgaccccagagcctga

SEQ ID NO: 249 - DNA, 2092 bp, Artificial Sequence
  Encoding SERPING1
aaccccaatgctacttctagctcctctcaggaccctgagagcctgcaggacaggggggagggcaaggtggccaccactgtgatctctaagatgctgtttgtggagcccatcctggaggtgagcagcctgcccaccaccaacagcaccaccaactctgccactaagatcactgccaacaccactgatgagcccaccacccagcccactactgagcccaccacccagcctactatccagcccacccagcccactacccagctgcccactgacagccctacccagcccaccactggcagcttctgccctgggcctgtgaccctgtgctctgacctggagagccattctactgaggctgtgctgggggatgccctggtggacttctctctgaagctgtaccatgctttctctgccatgaagaaggtggagactaacatggcttttagccccttcagcattgctagcctgctgacccaggtgctgctgggtaagaccctgcttgaattctctccaggtcatttgttggacactcccataagagtcaccaatccagacacttacaaagccatgcctctgggaagaagctgtaaaaatgggctattatatattgggggtggggtagagggatgtatcttttcattcttgaacattccatcatttcacagtgatgtaataggcaccattgcttgtaaaactctgtgactatacaagaacatataaaataaggtcccagccactaaccatgtttcatggcaaggagaggtgataagaaagatgaaattattatcagaagaagcagaaagccagcagcctagtgtctgacttagtgggaggtcaaaaaaatgtaaatcctctgccatcttgagggattactgtcaagtcccatttggtaattaccctaggaatggcacaaacaaattactacaagcagtggggacagagctattactccccagagagaattctaaaaaggctacagaatctttcttgagagattgagagaacacttccagctcagatgatctgtgatcccctccaaagcagggaataccctccattccagcctggtccccaaccctcattcccaaggaaggccccccactcatcctgcaagtatctttcatctctgccctttgttgcaggggctggggagaacactaagaccaacctggaatctatcctgagctaccccaaggacttcacctgtgtgcaccaggccctgaagggcttcaccaccaagggggtgacctctgtgagccagatcttccacagccctgacctggccatcagggatacttttgtgaatgccagcagaaccctgtactcttctagccccagggtgctgagcaataattctgatgctaacctggagctgatcaatacctgggtggctaagaataccaacaacaagattagcaggctgctggactctctgccttctgataccaggctggtgctgctgaatgccatttacctgtctgccaagtggaagaccacttttgaccctaagaagactaggatggagcctttccacttcaagaactctgtcattaaggtgcccatgatgaacagcaagaagtatcctgtggcccactttattgaccagactctgaaggccaaggtgggccagctgcagctgagccataacctgagcctggtgatcctggtgccccagaacctgaagcataggctggaggacatggagcaggctctgagcccctctgtgttcaaggctattatggagaagctggagatgagcaagttccagcccactctgctgaccctgcccagaatcaaggtgaccacctctcaggacatgctgagcatcatggaaaagctggagttctttgacttttcttatgacctgaatctgtgtggcctgactgaggatcctgatctgcaggtgtctgccatgcagcaccagactgtgctggagctgactgagactggggtggaggctgctgctgcttctgccatctctgtggccaggaccctgctggtgtttgaggtgcagcagcccttcctgtttgtgctgtgggaccagcagcacaagtttcctgtgttcatgggcagggtgtatgaccccagagcctga

SEQ ID NO: 250 - DNA, 2112 bp, Artificial Sequence
  Encoding SERPING1
aatccaaatgctaccagctccagctcccaggatccagagagtttgcaagacagaggcgaagggaaggtcgcaacaacagttatctccaagatgctattcgttgaacccatcctggaggtttccagcttgccgacaaccaactcaacaaccaattcagccaccaaaataacagctaataccactgatgaacccaccacacaacccaccacagagcccaccacccaacccaccatccaacccacccaaccaactacccagctcccaacagattctcctacccagcccactactgggtccttctgcccaggacctgttactctctgctctgacttggagagtcattcaacagaggccgtgttgggggatgctttggtagatttctccctgaagctctaccacgccttctcagcaatgaagaaggtggagaccaacatggccttttccccattcagcatcgccagcctccttacccaggtcctgctcggggctggggagaacaccaaaacaaacctggagagcatcctctcttaccccaaggacttcacctgtgtccaccaggccctgaagggcttcacgaccaaaggtgtcacctcagtctctcagattttccacagcccagacctggccataagggacacctttgtgaatgcctctcggaccctgtacagcagcagccccagagtcctaagcaacaacagtgacgccaacttggagctcatcaacacctgggtggccaagaacaccaacaacaagatcagccggctgctagacagtctgccctccgatacccgccttgtcctcctcaatgctatctacctgagtgccaagtggaagacaacatttgatcccaagaaaaccagaatggaaccctttcacttcaaaaactcagttataaaagtgcccatgatgaatagcaagaagtaccctgtggcccatttcattgaccaaactttgaaagccaaggtggggcagctgcagctctcccacaatctgagtttggtgatcctggtaccccagaacctgaaacatcgtcttgaagacatggaacaggctctcagcccttctgttttcaaggccatcatggagaaactggagatgtccaagttccagcccactctcctaacactaccccgcatcaaagtgacgaccagccaggatatgctctcaatcatggagaaattggaattcttcgatttttcttatgaccttaacctgtgtgggctgacagaggaccctgatcttcaggtttctgcgatgcagcaccagacagtgctggaactgacagagactggggtggaggcggctgcagcctccgccatctctgtggcccgcaccctgctggtctttgaagtgcagcagcccttcctcttcgtgctctgggaccagcagcacaagttccctgtcttcatggggcgagtatatgaccccagggccgacaaaactcacacatgcccaccgtgcccagcacctgaactcctggggggaccgtcagtcttcctcttccccccaaaacccaaggacaccctcatgatctcccggacccctgaggtcacatgcgtggtggtggacgtgagccacgaagaccctgaggtcaagttcaactggtacgtggacggcgtggaggtgcataatgccaagacaaagccgcgggaggagcagtacaacagcacgtaccgtgtggtcagcgtcctcaccgtcctgcaccaggactggctgaatggcaaggagtacaagtgcaaggtctccaacaaagccctcccagcccccatcgagaaaaccatctccaaagccaaagggcagccccgagaaccacaggtgtacaccctgcccccatcccgggatgagctgaccaagaaccaggtcagcctgacctgcctggtcaaaggcttctatcccagcgacatcgccgtggagtgggagagcaatgggcagccggagaacaactacaagaccacgcctcccgtgctggactccgacggctccttcttcctctacagcaagctcaccgtggacaagagcaggtggcagcaggggaacgtcttctcatgctccgtgatgcatgaggctctgcacaaccactacacgcagaagagcctctccctgtctccgggt

SEQ ID NO: 251 - DNA, 2112 bp, Artificial Sequence
  Encoding SERPING1
aatccaaatgctaccagctccagctcccaggatccagagagtttgcaagacagaggcgaagggaaggtcgcaacaacagttatctccaagatgctattcgttgaacccatcctggaggtttccagcttgccgacaaccaactcaacaaccaattcagccaccaaaataacagctaataccactgatgaacccaccacacaacccaccacagagcccaccacccaacccaccatccaacccacccaaccaactacccagctcccaacagattctcctacccagcccactactgggtccttctgcccaggacctgttactctctgctctgacttggagagtcattcaacagaggccgtgttgggggatgctttggtagatttctccctgaagctctaccacgccttctcagcaatgaagaaggtggagaccaacatggccttttccccattcagcatcgccagcctccttacccaggtcctgctcggggctggggagaacaccaaaacaaacctggagagcatcctctcttaccccaaggacttcacctgtgtccaccaggccctgaagggcttcacgaccaaaggtgtcacctcagtctctcagattttccacagcccagacctggccataagggacacctttgtgaatgcctctcggaccctgtacagcagcagccccagagtcctaagcaacaacagtgacgccaacttggagctcatcaacacctgggtggccaagaacaccaacaacaagatcagccggctgctagacagtctgccctccgatacccgccttgtcctcctcaatgctatctacctgagtgccaagtggaagacaacatttgatcccaagaaaaccagaatggaaccctttcacttcaaaaactcagttataaaagtgcccatgatgaatagcaagaagtaccctgtggcccatttcattgaccaaactttgaaagccaaggtggggcagctgcagctctcccacaatctgagtttggtgatcctggtaccccagaacctgaaacatcgtcttgaagacatggaacaggctctcagcccttctgttttcaaggccatcatggagaaactggagatgtccaagttccagcccactctcctaacactaccccgcatcaaagtgacgaccagccaggatatgctctcaatcatggagaaattggaattcttcgatttttcttatgaccttaacctgtgtgggctgacagaggaccctgatcttcaggtttctgcgatgcagcaccagacagtgctggaactgacagagactggggtggaggcggctgcagcctccgccatctctgtggcccgcaccctgctggtctttgaagtgcagcagcccttcctcttcgtgctctgggaccagcagcacaagttccctgtcttcatggggcgagtatatgaccccagggccgacaaaactcacacatgcccaccgtgcccagcacctgaactcctggggggaccgtcagtcttcctcttccccccaaaacccaaggacaccctcatgatctcccggacccctgaggtcacatgcgtggtggtggacgtgagccacgaagaccctgaggtcaagttcaactggtacgtggacggcgtggaggtgcataatgccaagacaaagccgcgggaggagcagtacaacagcacgtaccgtgtggtcagcgtcctcaccgtcctgcaccaggactggctgaatggcaaggagtacaagtgcaaggtctccaacaaagccctcccagcccccatcgagaaaaccatctccaaagccaaagggcagccccgagaaccacaggtgtacaccctgcccccatcccgggatgagctgaccaagaaccaggtcaatctgacctgcctggtcaaaggcttctatcccagcgacatcgccgtggagtgggagagcaatgggcagccggagaacaactacaagaccacgcctcccgtgctggactccgacggctccttcttcctcaatagcaagctcaccgtggacaagagcaggtggcagcaggggaacgtcttctcatgctccgtgatgcatgaggctctgcacaaccactacacgcagaagagcctctccctgtctccgggt

SEQ ID NO: 252 - DNA, 2112 bp, Artificial Sequence
  Encoding SERPING1
aatccaaatgctaccagctccagctcccaggatccagagagtttgcaagacagaggcgaagggaaggtcgcaacaacagttatctccaagatgctattcgttgaacccatcctggaggtttccagcttgccgacaaccaactcaacaaccaattcagccaccaaaataacagctaataccactgatgaacccaccacacaacccaccacagagcccaccacccaacccaccatccaacccacccaaccaactacccagctcccaacagattctcctacccagcccactactgggtccttctgcccaggacctgttactctctgctctgacttggagagtcattcaacagaggccgtgttgggggatgctttggtagatttctccctgaagctctaccacgccttctcagcaatgaagaaggtggagaccaacatggccttttccccattcagcatcgccagcctccttacccaggtcctgctcggggctggggagaacaccaaaacaaacctggagagcatcctctcttaccccaaggacttcacctgtgtccaccaggccctgaagggcttcacgaccaaaggtgtcacctcagtctctcagattttccacagcccagacctggccataagggacacctttgtgaatgcctctcggaccctgtacagcagcagccccagagtcctaagcaacaacagtgacgccaacttggagctcatcaacacctgggtggccaagaacaccaacaacaagatcagccggctgctagacagtctgccctccgatacccgccttgtcctcctcaatgctatctacctgagtgccaagtggaagacaacatttgatcccaagaaaaccagaatggaaccctttcacttcaaaaactcagttataaaagtgcccatgatgaatagcaagaagtaccctgtggcccatttcattgaccaaactttgaaagccaaggtggggcagctgcagctctcccacaatctgagtttggtgatcctggtaccccagaacctgaaacatcgtcttgaagacatggaacaggctctcagcccttctgttttcaaggccatcatggagaaactggagatgtccaagttccagcccactctcctaacactaccccgcatcaaagtgacgaccagccaggatatgctctcaatcatggagaaattggaattcttcgatttttcttatgaccttaacctgtgtgggctgacagaggaccctgatcttcaggtttctgcgatgcagcaccagacagtgctggaactgacagagactggggtggaggcggctgcagcctccgccatctctgtggcccgcaccctgctggtctttgaagtgcagcagcccttcctcttcgtgctctgggaccagcagcacaagttccctgtcttcatggggcgagtatatgaccccagggccgacaaaactcacacatgcccaccgtgcccagcacctgaactcctggggggaccgtcagtcttcctcttccccccaaaacccaaggacaccctcatgatctcccggacccctgaggtcacatgcgtggtggtggacgtgagccacgaagaccctgaggtcaagttcaactggtacgtggacggcgtggaggtgcataatgccaagacaaagccgcgggaggagcagtacaacagcacgtaccgtgtggtcagcgtcctcaccgtcctgcaccaggactggctgaatggcaaggagtacaagtgcaaggtctccaacaaagccctcccagcccccatcgagaaaaccatctccaaagccaaagggcagccccgagaaccacaggtgtacaccaagcccccatcccgggatgagctgaccaagaaccaggtcagcctgagctgcctggtcaaaggcttctatcccagcgacatcgccgtggagtgggagagcaatgggcagccggagaacaactacaagaccacggtgcccgtgctggactccgacggctccttcagactcgccagctacctcaccgtggacaagagcaggtggcagcaggggaacgtcttctcatgctccgtgatgcatgaggctctgcacaaccactacacgcagaagagcctctccctgtctccgggt

SEQ ID NO: 253 - DNA, 2112 bp, Artificial Sequence
  Encoding SERPING1
aatccaaatgctaccagctccagctcccaggatccagagagtttgcaagacagaggcgaagggaaggtcgcaacaacagttatctccaagatgctattcgttgaacccatcctggaggtttccagcttgccgacaaccaactcaacaaccaattcagccaccaaaataacagctaataccactgatgaacccaccacacaacccaccacagagcccaccacccaacccaccatccaacccacccaaccaactacccagctcccaacagattctcctacccagcccactactgggtccttctgcccaggacctgttactctctgctctgacttggagagtcattcaacagaggccgtgttgggggatgctttggtagatttctccctgaagctctaccacgccttctcagcaatgaagaaggtggagaccaacatggccttttccccattcagcatcgccagcctccttacccaggtcctgctcggggctggggagaacaccaaaacaaacctggagagcatcctctcttaccccaaggacttcacctgtgtccaccaggccctgaagggcttcacgaccaaaggtgtcacctcagtctctcagattttccacagcccagacctggccataagggacacctttgtgaatgcctctcggaccctgtacagcagcagccccagagtcctaagcaacaacagtgacgccaacttggagctcatcaacacctgggtggccaagaacaccaacaacaagatcagccggctgctagacagtctgccctccgatacccgccttgtcctcctcaatgctatctacctgagtgccaagtggaagacaacatttgatcccaagaaaaccagaatggaaccctttcacttcaaaaactcagttataaaagtgcccatgatgaatagcaagaagtaccctgtggcccatttcattgaccaaactttgaaagccaaggtggggcagctgcagctctcccacaatctgagtttggtgatcctggtaccccagaacctgaaacatcgtcttgaagacatggaacaggctctcagcccttctgttttcaaggccatcatggagaaactggagatgtccaagttccagcccactctcctaacactaccccgcatcaaagtgacgaccagccaggatatgctctcaatcatggagaaattggaattcttcgatttttcttatgaccttaacctgtgtgggctgacagaggaccctgatcttcaggtttctgcgatgcagcaccagacagtgctggaactgacagagactggggtggaggcggctgcagcctccgccatctctgtggcccgcaccctgctggtctttgaagtgcagcagcccttcctcttcgtgctctgggaccagcagcacaagttccctgtcttcatggggcgagtatatgaccccagggccgacaaaactcacacatgcccaccgtgcccagcacctgaactcctggggggaccgtcagtcttcctcttccccccaaaacccaaggacaccctctacatcacccgggagcctgaggtcacatgcgtggtggtggacgtgagccacgaagaccctgaggtcaagttcaactggtacgtggacggcgtggaggtgcataatgccaagacaaagccgcgggaggagcagtacaacagcacgtaccgtgtggtcagcgtcctcaccgtcctgcaccaggactggctgaatggcaaggagtacaagtgcaaggtctccaacaaagccctcccagcccccatcgagaaaaccatctccaaagccaaagggcagccccgagaaccacaggtgtacaccctgcccccatcccgggatgagctgaccaagaaccaggtcagcctgacctgcctggtcaaaggcttctatcccagcgacatcgccgtggagtgggagagcaatgggcagccggagaacaactacaagaccacgcctcccgtgctggactccgacggctccttcttcctctacagcaagctcaccgtggacaagagcaggtggcagcaggggaacgtcttctcatgctccgtgatgcatgaggctctgcacaaccactacacgcagaagagcctctccctgtctccgggt

SEQ ID NO: 254 - DNA, 2112 bp, Artificial Sequence
  Encoding SERPING1
aatccaaatgctaccagctccagctcccaggatccagagagtttgcaagacagaggcgaagggaaggtcgcaacaacagttatctccaagatgctattcgttgaacccatcctggaggtttccagcttgccgacaaccaactcaacaaccaattcagccaccaaaataacagctaataccactgatgaacccaccacacaacccaccacagagcccaccacccaacccaccatccaacccacccaaccaactacccagctcccaacagattctcctacccagcccactactgggtccttctgcccaggacctgttactctctgctctgacttggagagtcattcaacagaggccgtgttgggggatgctttggtagatttctccctgaagctctaccacgccttctcagcaatgaagaaggtggagaccaacatggccttttccccattcagcatcgccagcctccttacccaggtcctgctcggggctggggagaacaccaaaacaaacctggagagcatcctctcttaccccaaggacttcacctgtgtccaccaggccctgaagggcttcacgaccaaaggtgtcacctcagtctctcagattttccacagcccagacctggccataagggacacctttgtgaatgcctctcggaccctgtacagcagcagccccagagtcctaagcaacaacagtgacgccaacttggagctcatcaacacctgggtggccaagaacaccaacaacaagatcagccggctgctagacagtctgccctccgatacccgccttgtcctcctcaatgctatctacctgagtgccaagtggaagacaacatttgatcccaagaaaaccagaatggaaccctttcacttcaaaaactcagttataaaagtgcccatgatgaatagcaagaagtaccctgtggcccatttcattgaccaaactttgaaagccaaggtggggcagctgcagctctcccacaatctgagtttggtgatcctggtaccccagaacctgaaacatcgtcttgaagacatggaacaggctctcagcccttctgttttcaaggccatcatggagaaactggagatgtccaagttccagcccactctcctaacactaccccgcatcaaagtgacgaccagccaggatatgctctcaatcatggagaaattggaattcttcgatttttcttatgaccttaacctgtgtgggctgacagaggaccctgatcttcaggtttctgcgatgcagcaccagacagtgctggaactgacagagactggggtggaggcggctgcagcctccgccatctctgtggcccgcaccctgctggtctttgaagtgcagcagcccttcctcttcgtgctctgggaccagcagcacaagttccctgtcttcatggggcgagtatatgaccccagggccgacaaaactcacacatgcccaccgtgcccagcacctgaactcctggggggaccgtcagtcttcctcttccccccaaaacccaaggacaccctcatgatctcccggacccctgaggtcacatgcgtggtggtggacgtgagccacgaagaccctgaggtcaagttcaactggtacgtggacggcgtggaggtgcataatgccaagacaaagccgcgggaggagcagtacaacagcacgtaccgtgtggtcagcgtcctcaccgtcctgcaccaggactggctgaatggcaaggagtacaagtgcaaggtctccaacaaagccctcccagcccccatcgagaaaaccatctccaaagccaaagggcagccccgagaaccacaggtgtacaccctgcccccatcccgggatgagctgaccaagaaccaggtcagcctgacctgcctggtcaaaggcttctatcccagcgacatcgccgtggagtgggagagcaatgggcagccggagaacaactacaagaccacgcctcccgtgctggactccgacggctccttcttcctctacagcaagctcaccgtggacaagagcaggtggcagcaggggaacgtcttctcatgctccgtgctgcatgaggctctgcacagccactacacgcagaagagcctctccctgtctccgggt

SEQ ID NO: 255 - DNA, 2112 bp, Artificial Sequence
  Encoding SERPING1
aatccaaatgctaccagctccagctcccaggatccagagagtttgcaagacagaggcgaagggaaggtcgcaacaacagttatctccaagatgctattcgttgaacccatcctggaggtttccagcttgccgacaaccaactcaacaaccaattcagccaccaaaataacagctaataccactgatgaacccaccacacaacccaccacagagcccaccacccaacccaccatccaacccacccaaccaactacccagctcccaacagattctcctacccagcccactactgggtccttctgcccaggacctgttactctctgctctgacttggagagtcattcaacagaggccgtgttgggggatgctttggtagatttctccctgaagctctaccacgccttctcagcaatgaagaaggtggagaccaacatggccttttccccattcagcatcgccagcctccttacccaggtcctgctcggggctggggagaacaccaaaacaaacctggagagcatcctctcttaccccaaggacttcacctgtgtccaccaggccctgaagggcttcacgaccaaaggtgtcacctcagtctctcagattttccacagcccagacctggccataagggacacctttgtgaatgcctctcggaccctgtacagcagcagccccagagtcctaagcaacaacagtgacgccaacttggagctcatcaacacctgggtggccaagaacaccaacaacaagatcagccggctgctagacagtctgccctccgatacccgccttgtcctcctcaatgctatctacctgagtgccaagtggaagacaacatttgatcccaagaaaaccagaatggaaccctttcacttcaaaaactcagttataaaagtgcccatgatgaatagcaagaagtaccctgtggcccatttcattgaccaaactttgaaagccaaggtggggcagctgcagctctcccacaatctgagtttggtgatcctggtaccccagaacctgaaacatcgtcttgaagacatggaacaggctctcagcccttctgttttcaaggccatcatggagaaactggagatgtccaagttccagcccactctcctaacactaccccgcatcaaagtgacgaccagccaggatatgctctcaatcatggagaaattggaattcttcgatttttcttatgaccttaacctgtgtgggctgacagaggaccctgatcttcaggtttctgcgatgcagcaccagacagtgctggaactgacagagactggggtggaggcggctgcagcctccgccatctctgtggcccgcaccctgctggtctttgaagtgcagcagcccttcctcttcgtgctctgggaccagcagcacaagttccctgtcttcatggggcgagtatatgaccccagggccgacaaaactcacacatgcccaccgtgcccagcacctgaactcctggggggaccgtcagtcttcctcttccccccaaaacccaaggacaccctcatgatctcccggacccctgagatcacatgcgtggtggtggacgtgagccacgaagaccctgaggtcaagttcaactggtacgtggacggcgtggaggtgcataatgccaagacaaagccgcgggaggagcagtacaacagcacgtaccgtgtggtcagcgtcctcaccttcctgcaccaggactggctgaatggcaaggagtacaagtgcaaggtctccaacaaagccctcccagcccccatcgagaaaaccatctccaaagccaaagggcagccccgagaaccacaggtgtacaccctgcccccatcccgggatgagctgaccaagaaccaggtcagcctgacctgcctggtcaaaggcttctatcccagcgacatcgccgtggagtgggagagcaatgggcagccggagaacaactacaagaccacgcctcccgtgctggactccgacggctccttcttcctctacagcaagctcaccgtggacaagagcaggtggcagcaggggaacgtcttctcatgctccgtgctgcatgaggctctgcacaaccactacacgcagaagagcctctccctgtctccgggt

SEQ ID NO: 256 - DNA, 1437 bp, Artificial Sequence
  Encoding SERPING1
aaccccaatgctacttctagctcctctcaggaccctgagagcctgcaggacaggggggagggcaaggtggccaccactgtgatctctaagatgctgtttgtggagcccatcctggaggtgagcagcctgcccaccaccaacagcaccaccaactctgccactaagatcactgccaacaccactgatgagcccaccacccagcccactactgagcccaccacccagcctactatccagcccacccagcccactacccagctgcccactgacagccctacccagcccaccactggcagcttctgccctgggcctgtgaccctgtgctcagacctggagagccactctactgaggctgtgctgggggatgccctggtggacttctctctgaagctgtatcatgctttctctgccatgaagaaggtggagactaacatggcttttagccccttcagcattgctagcctgctgacccaggtgctgctgggggctggggagaacactaagaccaacctggaatctatcctgagctaccccaaggacttcacctgtgtgcaccaggccctgaagggcttcaccaccaagggggtgacctctgtgagccagatcttccacagccctgacctggccatcagggatacttttgtgaatgccagcagaaccctgtactcttctagccccagggtgctgagcaataattctgatgctaacctggagctgatcaatacctgggtggctaagaataccaacaacaagattagcaggctgctggactctctgccttctgataccaggctggtgctgctgaatgccatttacctgtctgccaagtggaagaccacttttgaccctaagaagactaggatggagcctttccacttcaagaactctgtcattaaggtgcccatgatgaacagcaagaagtatcctgtggcccactttattgaccagactctgaaggccaaggtgggccagctgcagctgagccacaacctgagcctggtgatcctggtgccccagaacctgaagcacaggctggaggacatggagcaggctctgagcccctctgtgttcaaggctattatggagaagctggagatgagcaagttccagcccactctgctgaccctgcccagaatcaaggtgaccacctctcaggacatgctgagcatcatggaaaagctggagttctttgacttttcttatgacctgaatctgtgtggcctgactgaggatcctgatctgcaggtgtctgccatgcagcaccagactgtgctggagctgactgagactggggtggaggctgctgctgcttctgccatctctgtggccaggaccctgctggtgtttgaggtgcagcagcccttcctgtttgtgctgtgggaccagcagcacaagtttcctgtgttcatgggcagggtgtatgaccccagagcctga

SEQ ID NO: 257 - DNA, 1437 bp, Artificial Sequence; identical to SEQ ID NO: 238
  Encoding SERPING1

SEQ ID NO: 258 - DNA, 2092 bp, Artificial Sequence
  Encoding SERPING1
aaccccaatgctacttctagctcctctcaggaccctgagagcctgcaggacaggggggagggcaaggtggccaccactgtgatctctaagatgctgtttgtggagcccatcctggaggtgagcagcctgcccaccaccaacagcaccaccaactctgccactaagatcactgccaacaccactgatgagcccaccacccagcccactactgagcccaccacccagcctactatccagcccacccagcccactacccagctgcccactgacagccctacccagcccaccactggcagcttctgccctgggcctgtgaccctgtgctctgacctggagagccattctactgaggctgtgctgggggatgccctggtggacttctctctgaagctgtaccatgctttctctgccatgaagaaggtggagactaacatggcttttagccccttcagcattgctagcctgctgacccaggtgctgctgggtaagaccctgcttgaattctctccaggtcatttgttggacactcccataagagtcaccaatccagacacttacaaagccatgcctctgggaagaagctgtaaaaatgggctattatatattgggggtggggtagagggatgtatcttttcattcttgaacattccatcatttcacagtgatgtaataggcacgattgcttgtaaaactctgtgactatacaagaacatataaaataaggtcgcagccactaaccatgtttcatggcaaggagaggtgataagaaagatgaaattattatcagaagaagcagaaagccagcagcctagtgtctgacttagtgggaggtcaaaaaaatgtaaatcctctgccatcttgagggattactgtcaagtcccatttggtaattaccctaggaatggcacaaacaaattactacaagcagtggggacagagctattactccccagagagaattctaaaaaggctacagaatctttcttgagagattgagagaacacttccagctcagatgatctgtgatcccctccaaagcagggaataccctccattccagcctggtccccaaccctcattcccaaggaaggcccccgactcatcctgcaagtatctttcatctctgccctttgttgcaggggctggggagaacactaagaccaacctggaatctatcctgagctaccccaaggacttcacctgtgtgcaccaggccctgaagggcttcaccaccaagggggtgacctctgtgagccagatcttccacagccctgacctggccatcagggatacttttgtgaatgccagcagaaccctgtactcttctagccccagggtgctgagcaataattctgatgctaacctggagctgatcaatacctgggtggctaagaataccaacaacaagattagcaggctgctggactctctgccttctgataccaggctggtgctgctgaatgccatttacctgtctgccaagtggaagaccacttttgaccctaagaagactaggatggagcctttccacttcaagaactctgtcattaaggtgcccatgatgaacagcaagaagtatcctgtggcccactttattgaccagactctgaaggccaaggtgggccagctgcagctgagccataacctgagcctggtgatcctggtgccccagaacctgaagcataggctggaggacatggagcaggctctgagcccctctgtgttcaaggctattatggagaagctggagatgagcaagttccagcccactctgctgaccctgcccagaatcaaggtgaccacctctcaggacatgctgagcatcatggaaaagctggagttctttgacttttcttatgacctgaatctgtgtggcctgactgaggatcctgatctgcaggtgtctgccatgcagcaccagactgtgctggagctgactgagactggggtggaggctgctgctgcttctgccatctctgtggccaggaccctgctggtgtttgaggtgcagcagcccttcctgtttgtgctgtgggaccagcagcacaagtttcctgtgttcatgggcagggtgtatgaccccagagcctga

SEQ ID NO: 259 - DNA, 66 bp, Artificial Sequence
  Encoding signal sequence
atggctagcagactgactctgctgaccctgctgctgctgctgctggctggggacagggccagcagc

SEQ ID NO: 260 - DNA, 66 bp, Artificial Sequence
  Encoding signal sequence
atggccagcaggctgaccctgctgactctgctgctgctgctgctggctggggacagggccagcagc

SEQ ID NO: 261 - DNA, 66 bp, Artificial Sequence; identical to SEQ ID NO: 259
  Encoding signal sequence

SEQ ID NO: 262 - DNA, 66 bp, Artificial Sequence; identical to SEQ ID NO: 259
  Encoding signal sequence

SEQ ID NO: 263 - DNA, 66 bp, Artificial Sequence
  Encoding signal sequence
atggccagcaggctgaccctgctgaccctgctgctgctcctgctggctggggatagggccagcagc

SEQ ID NO: 264 - DNA, 66 bp, Artificial Sequence
  Encoding signal sequence
atggcctctaggctgactctgctgactctgctgctcctgctgctggctggggacagggccagctct

SEQ ID NO: 265 - DNA, 66 bp, Artificial Sequence
  Encoding signal sequence
atggctagcaggctgaccctgctgaccctgctgctcctgctgctggctggggacagggcctctagc

SEQ ID NO: 266 - DNA, 66 bp, Artificial Sequence
  Encoding signal sequence
atggcctccaggctgaccctgctgaccctcctgctgctcctgctggctggggatagagcctctagc

SEQ ID NO: 267 - DNA, 66 bp, Artificial Sequence
  Encoding signal sequence
atggcctccaggctgaccctgctcaccctcctgctgctcctgctggctggggacagggcctccagc

SEQ ID NO: 268 - DNA, 66 bp, Artificial Sequence
  Encoding signal sequence
atggcctccaggctgaccctgctgaccctcctgctgctcctgctggctggggacagagccagcagc

SEQ ID NO: 269 - DNA, 1437 bp, Artificial Sequence; identical to SEQ ID NO: 238
  Encoding SERPING1

I/We claim:

1. A polynucleotide comprising a nucleic acid encoding a C1 inhibitor, wherein the nucleic acid is CpG-reduced and/or codon optimized compared to the wild-type coding sequence of the C1 inhibitor.

2. The polynucleotide of claim 1, wherein said polynucleotide comprises a nucleic acid sequence at least 85% identical to SEQ ID NO: 238, 236 or 243 and said C1 inhibitor comprises a sequence at least 93% identical to SEQ ID NO: 181.

3. The polynucleotide of claim 2, wherein said polynucleotide comprises a nucleic acid sequence at least 85% identical to SEQ ID NO: 238 said C1 inhibitor comprises a sequence at least 95% identical to SEQ ID NO: 181.

4. The polynucleotide of claim 3, wherein said polynucleotide comprises a nucleic acid sequence at least 95% identical to SEQ ID NO: 238 and said C1 inhibitor comprises a sequence at least 95% identical to SEQ ID NO: 181.

5. The polynucleotide of claim 4, wherein said polynucleotide comprises a nucleic acid sequence at least 97% identical to SEQ ID NO: 238 said C1 inhibitor comprises SEQ ID NO: 181.

6. The polynucleotide of any one of claims 2-5, wherein said polynucleotide further comprises a signal peptide sequence at the 5′ end of said nucleic acid sequence and said signal peptide sequence is at least 95% identical to the nucleic acid of SEQ ID NO: 264.

7. The polynucleotide of claim 1, wherein the nucleic acid is selected from the group consisting of: (1) a polynucleotide having at least 83% sequence identity to the sequence of SEQ ID NO: 105; (2) a polynucleotide having at least 83% sequence identity to the sequence of SEQ ID NO: 106; (3) a polynucleotide having at least 80% sequence identity to the sequence of SEQ ID NO: 107; (4) a polynucleotide having at least 80% sequence identity to the sequence of SEQ ID NO: 108; (5) a polynucleotide having at least 83% sequence identity to the sequence of SEQ ID NO: 109; (6) a polynucleotide having at least 84% sequence identity to the sequence of SEQ ID NO: 110; (7) a polynucleotide having at least 80% sequence identity to the sequence of SEQ ID NO: 111; (8) a polynucleotide having at least 83% sequence identity to the sequence of SEQ ID NO: 112; (9) a polynucleotide having at least 82% sequence identity to the sequence of SEQ ID NO: 113; (10) a polynucleotide having at least 82% sequence identity to the sequence of SEQ ID NO: 114; (11) a polynucleotide having at least 82% sequence identity to the sequence of SEQ ID NO: 115; (12) a polynucleotide having at least 80% sequence identity to the sequence of SEQ ID NO: 116; (13) a polynucleotide having at least 80% sequence identity to the sequence of SEQ ID NO: 117; (14) a polynucleotide having at least 83% sequence identity to the sequence of SEQ ID NO: 118; (15) a polynucleotide having at least 80% sequence identity to the sequence of SEQ ID NO: 119; (16) a polynucleotide having at least 80% sequence identity to the sequence of SEQ ID NO: 120; (17) a polynucleotide having at least 80% sequence identity to the sequence of SEQ ID NO: 121; (18) a polynucleotide having at least 83% sequence identity to the sequence of SEQ ID NO: 122; (19) a polynucleotide having at least 93% sequence identity to the sequence of SEQ ID NO: 123; (20) a polynucleotide having at least 92% sequence identity to the sequence of SEQ ID NO: 124; (21) a polynucleotide having at least 89% sequence identity to the sequence of SEQ ID NO: 125; (22) a polynucleotide having at least 86% sequence identity to the sequence of SEQ ID NO: 126; (23) a polynucleotide having at least 92% sequence identity to the sequence of SEQ ID NO: 127; (24) a polynucleotide having at least 89% sequence identity to the sequence of SEQ ID NO: 128; (25) a polynucleotide having at least 89% sequence identity to the sequence of SEQ ID NO: 129; (26) a polynucleotide having at least 91% sequence identity to the sequence of SEQ ID NO: 130; (27) a polynucleotide having at least 92% sequence identity to the sequence of SEQ ID NO: 131; (28) a polynucleotide having at least 93% sequence identity to the sequence of SEQ ID NO: 132; (29) a polynucleotide having at least 93% sequence identity to the sequence of SEQ ID NO: 133; (30) a polynucleotide having at least 87% sequence identity to the sequence of SEQ ID NO: 134; (31) a polynucleotide having at least 89% sequence identity to the sequence of SEQ ID NO: 135; (32) a polynucleotide having at least 93% sequence identity to the sequence of SEQ ID NO: 136; (33) a polynucleotide having at least 93% sequence identity to the sequence of SEQ ID NO: 137; (34) a polynucleotide having at least 87% sequence identity to the sequence of SEQ ID NO: 138; (35) a polynucleotide having at least 86% sequence identity to the sequence of SEQ ID NO: 139; (36) a polynucleotide having at least 86% sequence identity to the sequence of SEQ ID NO: 140; (37) a polynucleotide having at least 86% sequence identity to the sequence of SEQ ID NO: 141, optionally, the C1 inhibitor comprises the amino acid sequence of SEQ ID NO: 181 or 192.

8. The polynucleotide of claims 1-7, wherein the nucleic acid contains fewer than 24 CpG dinucleotides, optionally 0 CpG dinucleotides.

9. The polynucleotide of claim 1, wherein the nucleic acid has a polynucleotide sequence of any one of SEQ ID NOs: 105-142, 145-147, 156, 171 and 172.

10. A polynucleotide comprising a nucleic acid encoding a variant C1 inhibitor, wherein the nucleic acid is selected from the group consisting of SEQ ID NOs: 143-144, 158, and 165-170, optionally the variant C1 inhibitor comprises an amino acid sequence of any one of SEQ ID NOs: 193-201.

11. A polynucleotide comprising a nucleic acid encoding a C1 inhibitor, wherein the nucleic acid comprises a sequence of SEQ ID NO: 119, and wherein the C1 inhibitor comprises the amino acid sequence of 192.

12. The polynucleotide of any one of claims 1-5 and 7-11, comprising a nucleic acid encoding a signal peptide sequence operably linked to the 5′ end of the polynucleotide sequence encoding the C1 inhibitor or the variant C1 inhibitor.

13. The polynucleotide of claim 12, wherein the signal peptide is selected from the group consisting of C1 inhibitor signal peptide, human chymotrypsinogen B2 signal peptide, ALB signal peptide, ORM1 signal peptide, TF signal peptide, AMBP signal peptide, LAMP1 signal peptide, BTN2A2 signal peptide, CD300 signal peptide, NOTCH2 signal peptide, STRC signal peptide, AHSG signal peptide, SYN1 signal peptide, SYN2 signal peptide, SYN3 signal peptide, and SYN4 signal peptide.

14. The polynucleotide acid of claim 13, wherein the signal peptide has the polynucleotide sequence of one of SEQ ID NOs: 84-103.

15. An expression cassette comprising the polynucleotide of any one of claims 1-14, operably linked to an expression control element.

16. The expression cassette of claim 15, further comprising a polyadenylation sequence operably linked to the 3′ end of the nucleic acid encoding the C1 inhibitor.

17. The expression cassette of claim 15 or 16, wherein the expression control element or polyadenylation sequence is CpG-reduced compared to the wild-type expression control element or polyadenylation sequence.

18. The expression cassette of any one of claims 15-18, wherein the expression control element comprises an ApoE/hAAT enhancer/promoter sequence.

19. The expression cassette of any one of claims 15-18, wherein the polyadenylation sequence comprises a bovine growth hormone (bGH) polyadenylation sequence.

20. The expression cassette of claim 18 or 19, wherein the ApoE/hAAT enhancer/promoter sequence or the bGH polyadenylation sequence is CpG-reduced compared to wild-type ApoE/hAAT enhancer/promoter sequence or bGH polyadenylation sequence.

21. The expression cassette of any one of claims 18-20, wherein the ApoE enhancer sequence comprises the polynucleotide sequence of one of SEQ ID NOs: 225 and 74-76.

22. The expression cassette of any one of claims 18-21, wherein the hAAT promoter sequence comprises the polynucleotide sequence of SEQ ID NOs: 79 or 80.

23. The expression cassette of any one of claims 18-22, wherein the bGH polyadenylation sequence comprises the polynucleotide sequence of SEQ ID NO: 83.

24. The expression cassette of any one of claims 15-23, further comprising an intron.

25. The expression cassette of claim 24, wherein the intron comprises a human hemoglobin R (HBB)-derived intron.

26. The expression cassette of claim 25, wherein the human hemoglobin R (HBB)-derived intron sequence comprises the polynucleotide sequence of SEQ ID NOs: 81 or 82.

27. The expression cassette of any one of claims 15-26, further comprising one or more enhancers.

28. The expression cassette of claim 27, wherein the enhancer is selected from the group consisting of ApoE, 2×ApoE, 4×ApoE, hAAT, WPRE3, and WPRE.

29. The expression cassette of claim 28, wherein the enhancer sequence is codon optimized.

30. The expression cassette of claim 28 or 29, wherein the enhancer comprises the polynucleotide sequence of one of SEQ ID NOs: 225 and 74-78 and 173-178.

31. The expression cassette of any one of claims 15-28, further comprising one or more response elements selected from the group consisting of an miRNA binding site, a regulated Irel-dependent decay (RIDD) sequence, an acute phase response element (APRE), a 5′ UTR, and a 3′ UTR.

32. The expression cassette of claim 31, wherein the expression cassette further comprises an miRNA binding site, optionally the miRNA binding site comprises the polynucleotide sequence of SEQ ID NO: 179.

33. The expression cassette of claim 31, wherein the expression cassette further comprises a RIDD sequence, optionally the RIDD sequence comprises the polynucleotide sequence of one of SEQ ID NOs: 185-187.

34. The expression cassette of claim 31, wherein the expression cassette further comprises an APRE sequence, optionally the APRE sequence comprises the polynucleotide sequence of one of SEQ ID NOs: 77, 78, 180, 182 and 183.

35. The expression cassette of claim 31, wherein the expression cassette further comprises a 3′ UTR, optionally the 3′ UTR comprises the polynucleotide sequence of SEQ ID NO: 184.

36. An adeno-associated virus (AAV) vector comprising the polynucleotide or expression cassette of any one of claims 1-35.

37. The AAV vector of claim 36, wherein the AAV vector comprises: (a) one or more of an AAV capsid, and (b) one or more AAV inverted terminal repeats (ITRs), wherein the AAV ITR(s) flanks the 5′ or 3′ terminus of the polynucleotide or the expression cassette.

38. The AAV vector of claim 37, wherein at least one or more of the ITRs is modified to have reduced CpGs.

39. The AAV vector of any one of claims 36-38, wherein the AAV vector has a capsid serotype comprising a modified or variant AAV VP1, VP2 and/or VP3 capsid having 90% or more sequence identity to AAV1, AAV2, AAV3, AAV4, AAV5, AAV6, AAV7, AAV8, AAV9, AAV10, AAV11, AAV12, Rh10, Rh74 (SEQ ID NO: 188), AAV3B, AAV-2i8, SEQ ID NO: 226, SEQ ID NO: 189, SEQ ID NO: 190, and/or SEQ ID NO: 191; or a capsid having 95% or more sequence identity to AAV1, AAV2, AAV3, AAV4, AAV5, AAV6, AAV7, AAV8, AAV9, AAV10, AAV11, AAV12, Rh10, Rh74 (SEQ ID NO: 188), AAV3B, AAV-2i8, SEQ ID NO: 226, SEQ ID NO: 189, SEQ ID NO: 190, and/or SEQ ID NO: 191; or a capsid having 100% sequence identity to AAV1, AAV2, AAV3, AAV4, AAV5, AAV6, AAV7, AAV8, AAV9, AAV10, AAV11, AAV12, Rh10, Rh74 (SEQ ID NO: 188), AAV3B, AAV-2i8, SEQ ID NO: 226, SEQ ID NO: 189, SEQ ID NO: 190, and/or SEQ ID NO: 191.

40. The AAV vector of any one of claims 36-39, wherein the ITRs comprise one or more ITRs of any of AAV1, AAV2, AAV3, AAV4, AAV5, AAV6, AAV7, AAV8, AAV9, AAV10, AAV11, AAV12, Rh10, Rh74, AAV3B, AAV serotypes, or a combination thereof.

41. An AAV vector comprising,
(1) a 5′ AAV ITR, optionally a 5′ ITR of AAV2, optionally a 5′ ITR comprising the polynucleotide sequence of SEQ ID NO: 70 or 72;
(2) one or more tissue specificity elements, wherein the tissue specificity element is a promoter, optionally the promoter comprises the polynucleotide sequence of SEQ ID NO: 79 or 80;
(3) one or more potency elements, wherein the one or more potency elements are enhancers or polyA sequences, optionally wherein the one or more potency elements have a polynucleotide sequence selected from the group consisting of SEQ ID NOs: 225, 74-76, 83, and 173-178;
(4) one or more response elements, wherein the one or more response elements are miRNA binding sites, regulated Irel-dependent decay (RIDD) sequences, acute phase response elements (APREs), introns, or 5′ or 3′ UTR sequences, optionally wherein the one or more response elements have a polynucleotide sequence selected from the group consisting of SEQ ID NOs: 77-78, 81-82, and 179-187;
(5) a nucleic acid encoding a signal peptide, optionally the signal peptide comprising an amino acid sequence selected from the group consisting of SEQ ID NOs: 203-218, optionally a polynucleotide sequence selected from the group consisting of SEQ ID NOs: 84-103;
(6) a nucleic acid encoding at least one of a C1 inhibitor, a variant C1 inhibitor, and a fusion or combination thereof,
(a) optionally, a C1 inhibitor having the amino acid sequence of SEQ ID NO: 181 or 192, optionally a polynucleotide sequence selected from the group consisting of SEQ ID NOs: 104-142, 145-147, 156, and 171-172;
(b) optionally, a variant C1 inhibitor having an amino acid sequence selected from the group consisting of SEQ ID NOs: 193-201, optionally a polynucleotide selected from the group consisting of SEQ ID NOs: 143, 144, 158, and 165-170; and
(7) a 3′ AAV ITR, optionally a 3′ ITR of AAV2, optionally a 3′ ITR comprising the polynucleotide sequence of SEQ ID NO: 71 or 73.

42. The AAV vector of claim 36 comprising a polynucleotide sequence having at least 99% identity to a sequence selected from the group consisting of SEQ ID NOs: 1-69 and 227-229.

43. The AAV vector of any one of claims 36-42, wherein said polynucleotide is encapsidated by a capsid comprising VP1 of SEQ ID NO: 226.

44. The AAV vector of claim 43, wherein said capsid comprises VP1 of SEQ ID NO: 226, VP2 of SEQ ID NO: 189 and VP3 of SEQ ID NO: 190.

45. The AAV vector of claim 43 or 44, wherein said polynucleotide comprises a nucleic acid sequence at least 99% identical to SEQ ID NO: 22, provided that said nucleic acid sequence encodes the sequence of SEQ ID NO: 192.

46. The AAV vector of claim 43 or 44, where said polynucleotide comprises the nucleic acid sequence of SEQ ID NO: 22.

47. An AAV vector comprising the polynucleotide sequence of SEQ ID NO: 22.

48. A pharmaceutical composition comprising one or a plurality of AAV vectors of any of claims 36-47 in a biologically compatible carrier or excipient.

49. The pharmaceutical composition of claim 48, further comprising empty AAV capsids.

50. The pharmaceutical composition of claim 49, wherein the ratio of said empty AAV capsids to the AAV vector is from about 100:1 to about 50:1, from about 50:1 to about 25:1, from about 25:1 to about 10:1, from about 10:1 to about 1:1, from about 1:1 to about 1:10, from about 1:10 to about 1:25, from about 1:25 to about 1:50, or from about 1:50 to about 1:100.

51. The pharmaceutical composition of any one of claims 48-50, further comprising a surfactant.

52. A method of treating a subject in need of C1 inhibitor, comprising administering to the subject a therapeutically effective amount of the polynucleotide or expression cassette of any one of claims 1-35, or the AAV vector of any one of claims 36-47, or the pharmaceutical composition of any one of claims 48-51, wherein the C1 inhibitor is expressed in the subject.

53. The method of claim 52, wherein the subject has hereditary angioedema (HAE).

54. The method of claim 42 or 53, wherein the polynucleotide, expression cassette, AAV vector, or pharmaceutical composition is administered to the subject intravenously, intraarterially, intra-cavity, intramucosally, or via catheter.

55. The method of any one of claims 52-54, wherein the AAV vector is administered to the subject in a range from about 1×10⁸ to about 1×10¹⁴ vector genomes per kilogram (vg/kg) of the weight of the subject.

56. The method of any one of claims 52-55, wherein said subject is a human and the method reduces, decreases or inhibits one or more symptoms of the need for C1 inhibitor or of HAE; or prevents or reduces progression or worsening of one or more symptoms of the need for C1 inhibitor or of HAE; or stabilizes one or more symptoms of the need for C1 inhibitor or of HAE; or improves one or more symptoms of the need for C1 inhibitor or of HAE.

57. A cell comprising the polynucleotide or expression cassette of any one of claims 1-35.

58. A cell that produces the AAV vector of any one of claims 36-47.

59. A method of producing the AAV vector of any one of claims 36-47, comprising (a) introducing the AAV vector into a packaging helper cell; and (b) culturing the helper cell under conditions to produce the AAV vector.

60. A polypeptide comprising a sequence at least 95%, or 100% to identical to any one of SEQ ID NOs: 215, 216, 217, and 218.

61. A nucleic acid comprising a sequence encoding the polypeptide of claim 60.
